(19) United States
(12) Patent Application Publication
(10) Pub. No.: US 2011/0021419 A1
(43) Pub. Date: Jan. 27, 2011

(54) Methods and Compositions for the Treatment of Heart Failure and Other Disorders

(76) Inventors: Daniel Zimmer, Somerville, MA (US); Angelika Fretzen, Somerville, MA (US); Mark Currie, Sterling, MA (US); G. Todd Milne, Brookline, MA (US)

Correspondence Address: Honigman Miller Schwartz & Cohn LLP/IRON, 350 East Michigan Avenue, Suite 300, Kalamazoo, MI, 49007-3800, US

(21) Appl. No.: 12/528,737

(22) PCT Filed: Feb. 26, 2008
(86) PCT No.: PCT/US08/54972

§ 371 Date: Sep. 28, 2010

Related U.S. Application Data
(60) Provisional application No. 60/891,626, filed on Feb. 26, 2007.

(51) Int. Cl. A61K 38/10; C07K 7/08; A61P 9/04; A61P 9/00; A61P 9/12; A61P 35/00; A61P 3/04; A61P 1/08; A61P 1/12; A61P 1/16; A61P 1/04; A61P 1/00; A61P 29/00

(52) U.S. Cl. 514/4.8; 530/327; 530/326; 514/21.5; 514/21.4; 514/16.4; 514/15.6; 514/15.7; 514/19.2

(57) ABSTRACT

Peptides that act as GC-C receptor agonists and contain at least one D-cys and are useful for the treatment of diuresis and heart disease as well as other disorders are described.

### TECHNICAL FIELD

[0001] This disclosure relates to methods and compositions for the treatment of heart failure, gastrointestinal disorders and other disorders.

### BACKGROUND

[0002] Heart failure is a hemodynamic disorder resulting from impairment of the ability of the ventricle to fill with and/or eject blood. The disorder is commonly characterized by shortness of breath, fatigue, limited exercise tolerance, and fluid retention (both pulmonary congestion and peripheral edema). Heart failure is generally progressive and can result in Class IV heart failure (NYHA Heart Failure Classification) in which any physical activity brings on symptoms such as shortness of breath, and symptoms can occur even when the patient is at rest. Patients with symptoms of advanced heart failure are treated by tightly controlling fluid status and are often administered intravenous peripheral vasodilators and/or positive inotropic agents. Patients suffering Class IV heart failure should be at complete rest (confined to a bed or chair). Among the agents that are intravenously administered for treatment of advanced heart failure are dobutamine (beta receptor antagonist), milrinone (phosphodiesterase inhibitor), and nesiritide. Nesiritide is a cardiac derived peptide hormone (human natriuretic peptide B) that is thought to bind to and activate guanylate cyclase A (GC-A) receptor.

[0003] The guanylate cyclase-C (GC-C) receptor (reviewed by Lucas et al. 2000 Pharmacol. Rev 52:375-414 and Vaandrager et al. 2002 Molecular and Cellular Biochemistry 230:73-83) is a key regulator in mammals of intestinal function (although low levels of GC-C have been detected in other tissues). GC-C responds to the endogenous hormones, guanylin and uroguanylin, and to enteric bacterial peptides from the heat stable enterotoxin family (ST peptides). When agonists bind to GC-C, there is an elevation of the second messenger, cyclic GMP, and an increase in chloride and bicarbonate secretion, resulting in an increase in intestinal fluid secretion.

### SUMMARY

[0004] Described herein are methods for treating other disorders such as congestive heart failure and benign prostatic hyperplasia by administering a peptide or small molecule (parenterally or orally) that acts as an agonist of the GC-C receptor. Such agents can be used in combination with natriuretic peptides (e.g., atrial natriuretic peptide, brain natriuretic peptide or C-type natriuretic peptide), a diuretic, or an inhibitor of angiotensin converting enzyme.

[0005] The peptides described herein can be used alone or in combination therapy to prevent and/or treat disorders associated with fluid and sodium retention, e.g., diseases of the electrolyte-water/electrolyte transport system within the kidney, gut and urogenital system, heart failure (e.g., congestive heart failure or acute heart failure), hypertension, salt dependent forms of high blood pressure, hepatic edema, and liver cirrhosis. In addition they can be used to facilitate diuresis or control intestinal fluid. The peptides and agonists described herein can also be used to treat disorders where there is abnormal proliferation of epithelial cells within the kidney (e.g. as in the case of renal cancer).

[0006] The peptides and agonists described herein can be used alone or in combination therapy to prevent and/or treat kidney disease. “Kidney disease” includes renal failure (including acute renal failure), renal insufficiency, nephrotic edema, glomerulonephritis, pyelonephritis, kidney failure, chronic renal failure, nephritis, nephrosis, azotemia, uremia, immune renal disease, acute nephritic syndrome, rapidly progressive nephritic syndrome, nephrotic syndrome, Berger's Disease, chronic nephritic/proteinuric syndrome, tubulointerstital disease, nephrotoxic disorders, renal infarction, atheroembolic renal disease, renal cortical necrosis, malignant nephroangiosclerosis, renal vein thrombosis, renal tubular acidosis, renal glucosuria, nephrogenic diabetes insipidus, Bartter's Syndrome, Liddle's Syndrome, polycystic kidney disease, medullary cystic disease, medullary sponge kidney, hereditary nephritis, and nail-patella syndrome, along with any disease or disorder that relates to the renal system and related disorders, as well as symptoms indicative of or related to, renal or kidney disease and related disorders.

[0007] The peptides and agonists described herein can be used alone or in combination therapy to prevent or treat polycystic kidney disease. Polycystic kidney disease” “PKD” (also called “polycystic renal disease”) refers to a group of disorders characterized by a large number of cysts distributed throughout dramatically enlarged kidneys. The resultant cyst development leads to impairment of kidney function and can eventually cause kidney failure. “PKD” specifically includes autosomal dominant polycystic kidney disease (ADPKD) and recessive autosomal recessive polycystic kidney disease (ARPKD), in all stages of development, regardless of the underlying cause.

[0008] The peptides and agonists described herein can be used for treating heart failure, including heart failure at any of stages I-IV according to New York Heart Association (NYHA) Functional Classification.

[0009] The peptides can also be used for treating IBS and other gastrointestinal disorders and conditions (e.g., gastrointestinal motility disorders, chronic intestinal pseudo-obstruction, colonic pseudo-obstruction, Crohn's disease, duodenogastric reflux, dyspepsia, functional dyspepsia, nonulcer dyspepsia, a functional gastrointestinal disorder, functional heartburn, gastroesophageal reflux disease (GERD), gastroparesis, irritable bowel syndrome (IBS, e.g., constipation predominant-IBS, diarrhea predominat-IBS, and/or alternating-IBS)), post-operative ileus, ulcerative colitis, chronic constipation, and disorders and conditions associated with constipation (e.g. constipation associated with use of opiate pain killers, post-surgical constipation, and constipation associated with neuropathic disorders as well as other conditions and disorders are described herein

[0010] Without being bound by any particular theory, in the case of heart failure, salt retention, fluid retention disorders and combinations thereof the peptides are also useful because they may elicit one or more of diuresis, naturesis and/or kaliuresis. Thus, the peptides described herein may be diuretics.

[0011] Without being bound by any particular theory, in the case of IBS and other gastrointestinal disorders the peptides are useful because they may increase gastrointestinal motility. The peptides may also decrease inflammation and may decrease gastrointestinal pain, visceral pain, chronic visceral hypersensitivity, or hypersensitivity to colorectal distension.

[0012] Described herein are pharmaceutical compositions comprising certain peptides that are capable of activating the guanylate-cyclase C (GC-C) receptor. Also described herein are pharmaceutical compositions comprising a peptide or GC-C agonist described herein and one or more additional therapeutic agents including, without limitation, the agents described herein. The other agents can be administered with the peptides described herein (simultaneously or sequentially). They can also be linked to a peptide described herein to create therapeutic conjugates.

[0013] Described herein are methods for treating various disorders by administering a peptide that acts as a partial or complete agonist of the GC-C receptor. In certain embodiments, the peptide includes at least six cysteines that can form three disulfide bonds. In certain embodiments the disulfide bonds are replaced by other covalent cross-links and in some cases the cysteines are substituted by other residues to provide for alternative covalent cross-links. The peptides may also include at least one trypsin or chymotrypsin cleavage site and/or an amino or carboxy-terminal analgesic peptide or small molecule, e.g., AspPhe or some other analgesic peptide. When present within the peptide, the analgesic peptide or small molecule may be preceded by a chymotrypsin or trypsin cleavage site that allows release of the analgesic peptide or small molecule. Certain peptides include a functional chymotrypsin or trypsin cleavage site located so as to allow inactivation of the peptide upon cleavage. Certain peptides having a functional cleavage site undergo cleavage and gradual inactivation in the digestive tract, and this is desirable in some circumstances. In certain peptides, a functional chymotrypsin site is altered, increasing the stability of the peptide in vivo.

[0014] The methods described herein include a method for increasing intestinal motility comprising administering a GC-C receptor agonist, e.g., a peptide described herein, to a patient in need thereof; a method for treating a disorder associated with reduced gastrointestinal transit rates or reduced gastrointestinal motility comprising administering a GC-C receptor agonist, e.g., a peptide described herein, to a patient in need thereof; a method for treating a gastrointestinal hypomotility disorder comprising administering a GC-C receptor agonist, e.g., a peptide described herein, to a patient in need thereof; a method for treating a non-inflammatory gastrointestinal disorder comprising administering a GC-C receptor agonist, e.g., a peptide described herein, to a patient in need thereof; a method for treating a gastrointestinal disorder other than Crohn's disease and ulcerative colitis comprising administering a GC-C receptor agonist to a patient in need thereof; and methods and compositions for increasing intestinal motility comprising administering a GC-C receptor agonist to a patient in need thereof. The disorders which can be treated by administering a GC-C receptor agonist include, for example, constipation, constipation dominant irritable bowel syndrome and pelvic floor dyssynergia. In certain embodiments the patient has been diagnosed as suffering from IBS according to the Rome criteria. In certain embodiments the patient is female.

[0015] In certain embodiments the peptides include either one or two or more contiguous negatively charged amino acids (e.g., Asp or Glu) or one or two or more contiguous positively charged residues (e.g., Lys or Arg) or one or two or more contiguous positively or negatively charged amino acids at the carboxy terminus. In these embodiments all of the flanking amino acids at the carboxy terminus are either positively or negatively charged. In other embodiments the carboxy terminal charged amino acids are preceded by a Leu. For example, any of the following amino acid sequences can be added to the carboxy terminus of the peptide: Asp; Asp Lys; Lys Lys Lys Lys Lys Lys; Asp Lys Lys Lys Lys Lys Lys; Leu Lys Lys; and Leu Asp. It is also possible to simply add Leu at the carboxy terminus.

[0016] Described herein is a peptide or a pharmaceutically acceptable salt thereof comprising the amino acid sequence:

Xaa₁ Xaa₂ Xaa₃ Cys Glu Xaa₆ Xaa₇ Cys Xaa₉ Pro Ala Cys Thr Gly Xaa₁₅ Xaa₁₆ (SEQ ID NO:7) or a pharmaceutically acceptable salt thereof,
[0017] wherein
[0018] Xaa₁ is any amino acid or is missing;
[0019] Xaa₂ is Ala, Gly, Lys, Ser, Val or is missing;
[0020] Xaa₃ is Cys or D-Cys;
[0021] Xaa₆ is any amino acid;
[0022] Xaa₇ is Cys or D-Cys;
[0023] Xaa₉ is Asn or Thr;
[0024] Xaa₁₅ is Cys or D-Cys;
[0025] Xaa₁₆ is Lys, Tyr or is missing;
   provided that:
   (a) one or more of Xaa₃, Xaa₇ and Xaa₁₅ is D-Cys when Xaa₁₆ is other than Lys; and
   (b) the peptide does not consist of the sequence D-Cys Cys Glu Leu Cys Cys Asn Pro Ala Cys Thr Gly Cys.

[0026] In various embodiments: Xaa₃ is D-Cys; Xaa₇ is D-Cys; Xaa₁₅ is D-Cys; Xaa₃ is D-Cys; Xaa₇ is Cys; Xaa₁₅ is D-Cys; Xaa₆ is Val, Ile, Leu Tyr, Phe, or Trp; Xaa₆ is Val, Ile, or Leu; Xaa₆ is Val; Xaa₆ is Ile; Xaa₆ is Leu; Xaa₆ is Tyr, Phe, Trp; Xaa₁ is any amino acid; Xaa₁ is Gly or Ala; Xaa₁ is Gly; Xaa₁ is Ala; Xaa₁ is missing; Xaa₆ is Tyr; Xaa₆ is Phe; Xaa₆ is Trp; at least one of Xaa₃, Xaa₇ and Xaa₁₅ is D-Cys; at least two of Xaa₃, Xaa₇ and Xaa₁₅ are D-Cys; Xaa₃, Xaa₇ and Xaa₁₅ are all D-Cys; Xaa₉ is Asn; Xaa₉ is Thr; Xaa₁₆ is Lys; Xaa₁₆ is Tyr; Xaa₁₆ is missing; the peptide is a peptide in any of FIGS. 3a and 3b; and the peptide is purified.

[0027] Also described is a pharmaceutical composition comprising any of the aforementioned peptides and a pharmaceutically acceptable carrier.

[0028] Also described is a method for reducing fluid retention, the method comprising administering the pharmaceutical composition comprising any of the aforementioned peptides and a pharmaceutically acceptable carrier or a pharmaceutical composition comprising a peptide consisting of the amino acid sequence D-Cys Cys Glu Leu Cys Cys Asn Pro Ala Cys Thr Gly Cys.

[0029] Also described is a method of treating a disorder selected from: heart failure, hypertension, salt dependent forms of high blood pressure, hepatic edema, or liver cirrhosis comprising administering a pharmaceutical composition comprising any of the aforementioned peptides and a pharmaceutically acceptable carrier or a pharmaceutical composition comprising a peptide consisting of the amino acid sequence D-Cys Cys Glu Leu Cys Cys Asn Pro Ala Cys Thr Gly Cys.

[0030] The peptides can be used to treat chronic or acute heart failure. In acute heart failure the patient appears to be in good health, but suddenly develops a large myocardial infarction or rupture of a cardiac valve. The acute heart failure is usually largely systolic and the sudden reduction in cardiac output often results in systemic hypotension without peripheral edema. Chronic heart failure is typically observed in patients with dilated cardiomyopathy or multivalvular heart disease that develops or progresses slowly. In chronic heart failure, arterial pressure tends to be well maintained until very late in the course, but there is often accumulation of peripheral edema

[0031] Also described is a method for increasing naturesis comprising administering the pharmaceutical composition comprising any of the aforementioned peptides and a pharmaceutically acceptable carrier or a pharmaceutical composition comprising a peptide consisting of the amino acid sequence D-Cys Cys Glu Leu Cys Cys Asn Pro Ala Cys Thr Gly Cys.

[0032] Also described is a method for increasing diuresis comprising administering the pharmaceutical composition comprising any of the aforementioned peptides and a pharmaceutically acceptable carrier or a pharmaceutical composition comprising a peptide consisting of the amino acid sequence D-Cys Cys Glu Leu Cys Cys Asn Pro Ala Cys Thr Gly Cys.

[0033] Also described is a method of treating a gastrointestinal disorder comprising administering the pharmaceutical composition comprising any of the aforementioned peptides and a pharmaceutically acceptable carrier or a pharmaceutical composition comprising a peptide consisting of the amino acid sequence D-Cys Cys Glu Leu Cys Cys Asn Pro Ala Cys Thr Gly Cys.

[0034] In various embodiments the gastrointestinal disorder is selected from: a gastrointestinal motility disorder, chronic intestinal pseudo-obstruction, colonic pseudo-obstruction, Crohn's disease, duodenogastric reflux, dyspepsia, functional dyspepsia, nonulcer dyspepsia, a functional gastrointestinal disorder, functional heartburn, gastroesophageal reflux disease (GERD), gastroparesis, irritable bowel syndrome, post-operative ileus, inflammatory bowel disorder, ulcerative colitis, constipation, chronic constipation, chronic idiopathic constipation.

[0035] Also described is a method for treating obesity comprising administering the pharmaceutical composition comprising any of the aforementioned peptides and a pharmaceutically acceptable carrier or a pharmaceutical composition comprising a peptide consisting of the amino acid sequence D-Cys Cys Glu Leu Cys Cys Asn Pro Ala Cys Thr Gly Cys.

[0036] Also described is a method for treating benign prostatic hyperplasia comprising administering the pharmaceutical composition comprising any of the aforementioned peptides and a pharmaceutically acceptable carrier or a pharmaceutical composition comprising a peptide consisting of the amino acid sequence D-Cys Cys Glu Leu Cys Cys Asn Pro Ala Cys Thr Gly Cys.

[0037] Also described is a method for treating constipation comprising administering the pharmaceutical composition comprising any of the aforementioned peptides and a pharmaceutically acceptable carrier or a pharmaceutical composition comprising a peptide consisting of the amino acid sequence D-Cys Cys Glu Leu Cys Cys Asn Pro Ala Cys Thr Gly Cys.

[0038] In various embodiments: the constipation is idiopathic constipation; the constipation is chronic idiopathic constipation; the gastrointestinal disorder is irritable bowel syndrome; the irritable bowel syndrome is diarrhea-predominant irritable bowel syndrome; the irritable bowel syndrome is constipation-predominant irritable bowel syndrome; the irritable bowel syndrome is alternating-irritable bowel syndrome; the gastrointestinal disorder is inflammatory bowel disorder; the gastrointestinal disorder is Crohn's disease; and the gastrointestinal disorder is ulcerative colitis.

[0039] Also described is a method for increasing gastrointestinal motility comprising administering the pharmaceutical composition comprising any of the aforementioned peptides and a pharmaceutically acceptable carrier or a pharmaceutical composition comprising a peptide consisting of the amino acid sequence D-Cys Cys Glu Leu Cys Cys Asn Pro Ala Cys Thr Gly Cys.

[0040] Also described is a method for decreasing gastrointestinal pain or visceral pain comprising administering the pharmaceutical composition comprising any of the aforementioned peptides and a pharmaceutically acceptable carrier or a pharmaceutical composition comprising a peptide consisting of the amino acid sequence D-Cys Cys Glu Leu Cys Cys Asn Pro Ala Cys Thr Gly Cys.

[0041] Also described is a method of preventing or treating a side-effect associated with opioid administration, the method comprising administering to a patient that is being treated with an opioid a pharmaceutical composition comprising any of the aforementioned peptides and a pharmaceutically acceptable carrier or a pharmaceutical composition comprising a peptide consisting of the amino acid sequence D-Cys Cys Glu Leu Cys Cys Asn Pro Ala Cys Thr Gly Cys. In various embodiments: the patient is being treated with an opioid selected from the group consisting of alfentanil, buprenorphine, butorphanol, codeine, dezocine, dihydrocodeine, fentanyl, hydrocodone, hydromorphone, levorphanol, meperidine (pethidine), methadone, morphine, nalbuphine, oxycodone, oxymorphone, pentazocine, propiram, propoxyphene, sufentanil and tramadol; the patient is being treated with an opioid selected from the group consisting of: morphine, codeine, oxycodone, hydrocodone, dihydrocodeine, propoxyphene, fentanyl and tramadol; the side effect is selected from the group consisting of constipation, nausea and vomiting; and the method further comprises administering an opioid antagonist (e.g., naloxone or naltrexone).

[0042] Also described is a pharmaceutical composition comprising an opioid and any forgoing peptide or a peptide consisting of the amino acid sequence D-Cys Cys Glu Leu Cys Cys Asn Pro Ala Cys Thr Gly Cys. In various embodiments: the opioid is selected from the group consisting of alfentanil, buprenorphine, butorphanol, codeine, dezocine, dihydrocodeine, fentanyl, hydrocodone, hydromorphone, levorphanol, meperidine (pethidine), methadone, morphine, nalbuphine, oxycodone, oxymorphone, pentazocine, propiram, propoxyphene, sufentanil and tramadol; and the opioid is selected from the group consisting of: morphine, codeine, oxycodone, hydrocodone, dihydrocodeine, propoxyphene, fentanyl and tramadol.

[0043] Also described is a pharmaceutical kit comprising:

(a) a first container containing pharmaceutical dosage units comprising an effective amount of an opioid; and
(b) a second container containing pharmaceutical dosage units comprising an effective amount of a forgoing peptide or a peptide consisting of the amino acid sequence D-Cys Cys Glu Leu Cys Cys Asn Pro Ala Cys Thr Gly Cys. In various embodiments: the opioid is selected from the group consisting of alfentanil, buprenorphine, butorphanol, codeine, dezocine, dihydrocodeine, fentanyl, hydrocodone, hydromorphone, levorphanol, meperidine (pethidine), methadone, morphine, nalbuphine, oxycodone, oxymorphone, pentazocine, propiram, propoxyphene, sufentanil and tramadol; and the opioid is selected from the group consisting of: morphine, codeine, oxycodone, hydrocodone, dihydrocodeine, propoxyphene, fentanyl and tramadol.

[0044] Also described is a method for preparing a pharmaceutical composition comprising admixing a forgoing peptide and a pharmaceutically acceptable carrier.

[0045] Also described herein are purified peptides comprising, consisting of, or consisting essentially of the amino acid sequence of SEQ ID NO: 7 and those peptides depictured in FIG. 3a and FIG. 3b.

[0046] Also described herein are pharmaceutical compositions comprising peptides comprising, consisting of, or consisting essentially of the amino acid sequence of SEQ ID NO:7 and those peptides depicted in FIG. 3a and FIG. 3b.

[0047] In certain embodiments, for example, when fully folded, the peptide includes disulfide bonds between Cys₃ and Cys₈, between Cys₄ and Cys₁₂ and between Cys₇ and Cys₁₅. In other embodiments, the peptide is a reduced peptide having no disulfide bonds. In still other embodiments the peptide has one or two disulfide bonds chosen from: a disulfide bond between Cys₃ and Cys₈, a disulfide bond between Cys₄ and Cys₁₂ and a disulfide bond between Cys₇ and Cys₁₅. In other embodiments, one or more of Cys₃, Cys₇, or Cys₁₅ is a D-Cys residue and the D-Cys residues can form disulfide bonds in the same manner as the Cys residues. Thus, the peptide may include, for example, one or more disulfide bonds between D-Cys₃ and Cys₈, between Cys₄ and Cys₁₂, between D-Cys₇ and Cys₁₅, between Cys₇ and D-Cys₁₅, between D-Cys₇ and D-Cys₁₅.

[0048] In some embodiments the peptide is 13, 14, 15, or 16 amino acids long.

[0049] In certain embodiments, one or more amino acids can be replaced by a non-naturally occurring amino acid or a naturally or non-naturally occurring amino acid analog. In certain embodiments, one or more L-amino acids can be substituted with a D-amino acid. There are many amino acids beyond the standard 20 amino acids (Ala, Arg, Asn, Asp, Cys, Gln, Glu, Gly, His, Ile, Leu, Lys, Met, Phe, Pro, Ser, Thr, Trp, Tyr, and Val). Some are naturally-occurring others are not (see, for example, Hunt, The Non-Protein Amino Acids: In Chemistry and Biochemistry of the Amino Acids, Barrett, Chapman and Hall, 1985). For example, an aromatic amino acid can be replaced by 3,4-dihydroxy-L-phenylalanine, 3-iodo-L-tyrosine, triiodothyronine, L-thyroxine, phenylglycine (Phg) or nor-tyrosine (norTyr). Phg and norTyr and other amino acids including Phe and Tyr can be substituted by, e.g., a halogen, —CH3, —OH, —CH₂NH₃, —C(O)H, —CH₂CH₃, —CN, —CH₂CH₂CH₃, —SH, or another group. Any amino acid can be substituted by the D-form of the amino acid. Thus, for example, a cysteine residue can be substituted by a D-cysteine residue.

[0050] With regard to non-naturally occurring amino acids or naturally and non-naturally occurring amino acid analogs, a number of substitutions in the peptide of SEQ ID NO:7 or the peptides of FIG. 3a and FIG. 3b are possible alone or in combination.

[0051] Glu can be replaced by gamma-Hydroxy-Glu or gamma-Carboxy-Glu.

[0052] Ala can be replaced by an alpha substituted amino acid such as L-alpha-methylphenylalanine or by analogues such as: 3-Amino-Tyr; Tyr(CH₃); Tyr(PO₃(CH₃)₂); Tyr(SO₃H); beta-Cyclohexyl-Ala; beta-(1-Cyclopentenyl)-Ala; beta-Cyclopentyl-Ala; beta-Cyclopropyl-Ala; beta-Quinolyl-Ala; beta-(2-Thiazolyl)-Ala; beta-(Triazole-1-yl)-Ala; beta-(2-Pyridyl)-Ala; beta-(3-Pyridyl)-Ala; Amino-Phe; Fluoro-Phe; Cyclohexyl-Gly; tBu-Gly; beta-(3-benzothienyl)-Ala; beta-(2-thienyl)-Ala; 5-Methyl-Trp; and 4-Methyl-Trp.

[0053] Pro can be an N(alpha)-C(alpha) cyclized amino acid analogues with the structure:

[chemical structure]

Pro can also be homopro (L-pipecolic acid); hydroxy-Pro; 3,4-Dehydro-Pro; 4-fluoro-Pro; or alpha-methyl-Pro.

[0054] Val or Leu can also be an alpha-substituted or N-methylated amino acid such as alpha-amino isobutyric acid (aib), L/D-alpha-ethylalanine (L/D-isovaline), L/D-methylvaline, or L/D-alpha-methylleucine or a non-natural amino acid such as beta-fluoro-Ala.

[0055] Gly can be alpha-amino isobutyric acid (aib) or L/D-alpha-ethylalanine (L/D-isovaline).

[0056] Further examples of unnatural amino acids include: an unnatural analogue of tyrosine; an unnatural analogue of glutamine; an unnatural analogue of phenylalanine; an unnatural analogue of serine; an unnatural analogue of threonine; an alkyl, aryl, acyl, azido, cyano, halo, hydrazine, hydrazide, hydroxyl, alkenyl, alkynl, ether, thiol, sulfonyl, seleno, ester, thioacid, borate, boronate, phospho, phosphono, phosphine, heterocyclic, enone, imine, aldehyde, hydroxylamine, keto, or amino substituted amino acid, or any combination thereof; an amino acid with a photoactivatable cross-linker; a spin-labeled amino acid; a fluorescent amino acid; an amino acid with a novel functional group; an amino acid that covalently or noncovalently interacts with another molecule; a metal binding amino acid; an amino acid that is amidated at a site that is not naturally amidated, a metal-containing amino acid; a radioactive amino acid; a photocaged and/or photoisomerizable amino acid; a biotin or biotin-analogue containing amino acid; a glycosylated or carbohydrate modified amino acid; a keto containing amino acid; amino acids comprising polyethylene glycol or polyether; a heavy atom substituted amino acid (e.g., an amino acid containing deuterium, tritium, ¹³C, ¹⁵N, or ¹⁸O); a chemically cleavable or photocleavable amino acid; an amino acid with an elongated side chain; an amino acid containing a toxic group; a sugar substituted amino acid, e.g., a sugar substituted serine or the like; a carbon-linked sugar-containing amino acid; a redox-active amino acid; an α.-hydroxy containing acid; an amino thio acid containing amino acid; an α, α disubstituted amino acid; a β-amino acid; a cyclic amino acid other than proline; an O-methyl-L-tyrosine; an L-3-(2-naphthyl)alanine; a 3-methyl-phenylalanine; a p-acetyl-L-phenylalanine; an 0-4-allyl-L-tyrosine; a 4-propyl-L-tyrosine; a tri-O-acetyl-GlcNAcβ-serine; an L-Dopa; a fluorinated phenylalanine; an isopropyl-L-phenylalanine; a p-azido-L-phenylalanine; a p-acyl-L-phenylalanine; a p-benzoyl-L-phenylalanine; an L-phosphoserine; a phosphonoserine; a phosphonotyrosine; a p-iodo-phenylalanine; a 4-fluorophenylglycine; a p-bromophenylalanine; a p-amino-L-phenylalanine; an isopropyl-L-phenylalanine; L-3-(2-naphthyl)alanine; an amino-, isopropyl-, or O-allyl-containing phenylalanine analogue; a dopa, O-methyl-L-tyrosine; a glycosylated amino acid; a p-(propargyloxy)phenylalanine; dimethyl-Lysine; hydroxy-proline; mercaptopropionic acid; methyl-lysine; 3-nitro-tyrosine; norleucine; pyro-glutamic acid; Z (Carbobenzoxyl); ε-Acetyl-Lysine; β-alanine; aminobenzoyl derivative; aminobutyric acid (Abu); citrulline; aminohexanoic acid; aminoisobutyric acid; cyclohexylalanine; d-cyclohexylalanine; hydroxyproline; nitro-arginine; nitro-phenylalanine; nitro-tyrosine; norvaline; octahydroindole carboxylate; ornithine; penicillamine; tetrahydroisoquinoline; acetamidomethyl protected amino acids and pegylated amino acids. Further examples of unnatural amino acids and amino acid analogs can be found in U.S. 20030108885, U.S. 20030082575, US20060019347 (paragraphs 410-418) and the references cited therein. The peptides described herein can include further modifications including those described in US20060019347, paragraph 589.

[0057] In some embodiments, an amino acid can be replaced by a naturally-occurring, non-essential amino acid, e.g., taurine.

[0058] Methods to manfacture peptides containing unnatural amino acids can be found in, for example, US20030108885, US20030082575, US20060019347, Deiters et al., J Am Chem. Soc. (2003) 125:11782-3, Chin et al., Science (2003) 301:964-7, and the references cited therein.

[0059] Peptides that include non-natural amino acids can also be prepared using the methods described in WO02086075

[0060] The peptides described herein can have one or more conventional peptide bonds replaced by an alternative bond. Such replacements can increase the stability of the peptide. For example, replacement of the peptide bond between D-Cys₁₅ or Cys₁₅ and Xaa₁₆ with an alternative bond can reduce cleavage by carboxy peptidases and may increase half-life in the digestive tract. Bonds that can replace peptide bonds include: a retro-inverso bonds (C(O)—NH instead of NH—C(O); a reduced amide bond (NH—CH₂); a thiomethylene bond (S—CH₂ or CH₂—S); an oxomethylene bond (O—CH₂ or CH₂—O); an ethylene bond (CH₂—CH₂); a thioamide bond (C(S)—NH); a trans-olefine bond (CH═CH); an fluoro substituted trans-olefine bond (CF═CH); a ketomethylene bond (C(O)—CHR or CHR—C(O) wherein R is H or CH₃; and a fluoro-ketomethylene bond (C(O)—CFR or CFR—C(O) wherein R is H or F or CH₃.

[0061] The peptides described herein can be modified using standard modifications. Modifications may occur at the amino (N—), carboxy (C—) terminus, internally or a combination of any of the preceeding. In one aspect described herein, there may be more than one type of modification of the peptide. Modifications include but are not limited to: acetylation, amidation, biotinylation, cinnamoylation, farnesylation, formylation, myristoylation, palmitoylation, phosphorylation (Ser, Tyr or Thr), stearoylation, succinylation, sulfurylation and cyclisation (via disulfide bridges or amide cyclisation), and modification by Cy3 or Cy5. The peptides described herein may also be modified by 2,4-dinitrophenyl (DNP), DNP-lysin, modification by 7-Amino-4-methyl-coumarin (AMC), flourescein, NBD (7-Nitrobenz-2-Oxa-1,3-Diazole), p-nitro-anilide, rhodamine B, EDANS (5-((2-aminoethyl)amino)naphthalene-1sulfonic acid), dabcyl, dabsyl, dansyl, Texas Red, FMOC, and Tamra (Tetramethylrhodamine). The peptides described herein may also be conjugated to, for example, polyethylene glycol (PEG); alkyl groups (e.g., C1-C20 straight or branched alkyl groups); fatty acid radicals; combinations of PEG, alkyl groups and fatty acid radicals (see U.S. Pat. No. 6,309,633; Soltero et al., 2001 Innovations in Pharmaceutical Technology 106-110); BSA and KLH (Keyhole Limpet Hemocyanin). The addition of PEG and other polymers which can be used to modify peptides described herein is described in US2006019347 section IX.

[0062] The peptides and agonists described herein can be chemically modified to increase therapeutic activity by synthetically adding sugar moieties (WO 88/02756; WO 89/09786; DE 3910667 A1, EP 0 374 089 A2; and U.S. Pat. No. 4,861,755), adding cationic anchors (EP0363589), lipid moieties (WO91/09837; U.S. Pat. No. 4,837,303) or the substituents described as compounds I, II, and III in U.S. Pat. No. 5,552,520.

[0063] The peptides described herein bear some sequence similarity to ST peptides. However, they include amino acid changes and/or additions that improve functionality. These changes can, for example, increase or decrease activity (e.g., increase or decrease the ability of the peptide to stimulate intestinal motility), alter the ability of the peptide to fold correctly, alter the stability of the peptide, alter the ability of the peptide to bind the GC-C receptor and/or decrease toxicity. In some cases the peptides may function more desirably than wild-type ST peptide. For example, they may limit undesirable side effects such as diarrhea and dehydration.

[0064] In some embodiments one or both members of one or more pairs of Cys residues (including where a Cys residue has been substituted with a D-cys residue) which normally form a disulfide bond can be replaced by homocysteine, penicillamine, 3-mercaptoproline (Kolodziej et al. 1996 Int J Pept Protein Res 48:274); β, β dimethylcysteine (Hunt et al. 1993 Int J Pept Protein Res 42:249) or diaminopropionic acid (Smith et al. 1978 J Med Chem 21:117) to form alternative internal cross-links at the positions of the normal disulfide bonds.

[0065] In addition, one or more disulfide bonds can be replaced by alternative covalent cross-links, e.g., an amide linkage (—CH₂CH(O)NHCH₂— or —CH₂NHCH(O)CH₂—), an ester linkage, a thioester linkage, a lactam bridge, a carbamoyl linkage, a urea linkage, a thiourea linkage, a phosphonate ester linkage, an alkyl linkage (—CH₂CH₂CH₂CH₂—), an alkenyl linkage (—CH₂CH═CHCH₂—), an ether linkage (—CH₂CH₂OCH₂— or —CH₂OCH₂CH₂—), a thioether linkage (—CH₂CH₂SCH₂— or —CH₂SCH₂CH₂—), an amine linkage (—CH₂CH₂NHCH₂— or —CH₂NHCH₂CH₂—) or a thioamide linkage (—CH₂CH(S)HNHCH₂— or —CH₂NHCH(S)CH₂—). For example, Ledu et al. (Proc Nat'l Acad. Sci. 100:11263-78, 2003) describe methods for preparing lactam and amide cross-links. Schafmeister et al. (J. Am. Chem. Soc. 122:5891, 2000) describes stable, hydrocarbon cross-links. Hydrocarbon cross links can be produced via metathesis (or methathesis followed by hydrogenation in the case of saturated hydrocarbons cross-links) using one or another of the Grubbs catalysts (available from Materia, Inc. and Sigma-Aldrich and described, for example, in U.S. Pat. Nos. 5,831,108 and 6,111,121). In some cases, the generation of such alternative cross-links requires replacing the Cys residues with other residues such as Lys or Glu or non-naturally occurring amino acids. In addition the lactam, amide and hydrocarbon cross-links can be used to stabilize the peptide even if they link amino acids at positions other than those occupied by Cys. Such cross-links can occur between two amino acids that are separated by two amino acids or between two amino acids that are separated by six amino acids (see, e.g., Schafmeister et al. (J. Am. Chem. Soc. 122:5891, 2000)).

[0066] The peptide may contain additional carboxyterminal or amino terminal amino acids or both. For example, the peptide can include an amino terminal sequence that facilitates recombinant production of the peptide and is cleaved prior to administration of the peptide to a patient. The peptide can also include other amino terminal or carboxyterminal amino acids. In some cases the additional amino acids protect the peptide, stabilize the peptide or alter the activity of the peptide. In some cases some or all of these additional amino acids are removed prior to administration of the peptide to a patient. The peptide can include 1, 2, 3, 4, 5, 10, 15, 20, 25, 30, 40, 50, 60, 70 80, 90, 100 or more amino acids at its amino terminus or carboxy terminus or both. The number of flanking amino acids need not be the same. For example, there can be 10 additional amino acids at the amino terminus of the peptide and none at the carboxy terminus.

[0067] The peptides can be co-administered with or linked, e.g., covalently linked to any of a variety of other peptides or compounds including analgesic peptides or analgesic compounds including, without limitation, the agents described herein.

[0068] Amino acid, non-amino acid, peptide and non-peptide spacers can be interposed between a peptide that is a GC-C receptor agonist and a peptide that has some other biological function, e.g., an analgesic peptide or a peptide used to treat obesity. The linker can be one that is cleaved from the flanking peptides in vivo or one that remains linked to the flanking peptides in vivo. For example, glycine, beta-alanine, glycyl-glycine, glycyl-beta-alanine, gamma-aminobutyric acid, 6-aminocaproic acid, L-phenylalanine, L-tryptophan and glycil-L-valil-L-phenylalanine can be used as spacers (Chaltin et al. 2003 Helvetica Chimica Acta 86:533-547; Caliceti et al. 1993 FARMCO 48:919-32) as can polyethylene glycols (Butterworth et al. 1987 J. Med. Chem. 30:1295-302) and maleimide derivatives (King et al. 2002 Tetrahedron Lett. 43:1987-1990). Various other linkers are described in the literature (Nestler 1996 Molecular Diversity 2:35-42; Finn et al. 1984 Biochemistry 23:2554-8; Cook et al. 1994 Tetrahedron Lett. 35:6777-80; Brokx et al. 2002 Journal of Controlled Release 78:115-123; Griffin et al. 2003 J. Am. Chem. Soc. 125:6517-6531; Robinson et al. 1998 Proc. Natl. Acad. Sci. USA 95:5929-5934). Linkers are also described in US20050171014, for example, amino acid linkers such as FALA, VLALA, ALAL, ALALA, 2-cyclohexyl-L-alanine-LALA, 2-cyclohexyl-L-alanine-2-cyclohexyl-L-alanine-LAL, 1-naphtyl-alanine-ChaLAL and 1-naphtyl-alanine-LALA. Peptides and agonists described herein can also be conjugated to: an affinity tag (such as (histidine 6) H6), a HIV tat peptide residues 49-57, HIV tat peptide residues 49-56, the tat sequence YGRKKRRQRRR, a polyarginine peptide having from 6 to 20 residues (such as R6) and the following peptide sequences: YARKARRQARR, YARAAARQARA, YARAARRAARR, YARAARRAARA, ARRRRRRRRR, and YAAARRRRRRR, which are disclosed in WO 99/29721 and in U.S. Pat. No. 6,221,355 (seq. id. nos. 3-8).

[0069] The peptides described herein can be attached to one, two or more different moieties each providing the same or different functions. For example, the peptide can be linked to a molecule that is an analgesic and to a peptide that is used to treat obesity. The peptide and various moieties can be ordered in various ways. For example, a peptide described herein can have an analgesic peptide linked to its amino terminus and an anti-obesity peptide linked to its carboxy terminus. The additional moieties can be directly covalently bonded to the peptide or can be bonded via linkers.

[0070] The peptides described herein can be a cyclic peptide or a linear peptide. In addition, multiple copies of the same peptide can be incorporated into a single cyclic or linear peptide.

[0071] The peptides can include the amino acid sequence of a peptide that occurs naturally in a vertebrate (e.g., mammalian) species or in a bacterial species. In addition, the peptides can be partially or completely non-naturally occurring peptides. Also within the disclosure are peptidomimetics corresponding to the peptides described herein.

[0072] Described herein is a method for treating congestive heart failure, the method comprising administering to a patient a pharmaceutical composition comprising a purified peptide comprising, consisting of or consisting essentially of the amino acid sequence of SEQ ID NO:7 (e.g., a peptide in FIG. 3a or FIG. 3b). The peptide can be administered alone or in combination with another agent for treatment of congestive heart failure, for example, a natriuretic peptide such as atrial natriuretic peptide, brain natriuretic peptide or C-type natriuretic peptide, an inhibitor of angiotensin converting enzyme, a diuretic (e.g. furesomide (Lasix), bumetanide (Bumex), ethacrynic acid (Edecrin), torsemide (Demadex), amiloride (Midamor), spironolactone (Aldactone), chorthiazide (Diuril), metolazone (Zaroxylyn)), an Angiotension-Converting Enzyme (ACE) inhibitor (e.g. captopril (Capoten), enalopril (Vasotec), lisinopril (Prinivil, Zestril), ramipril (Altace)), a Beta blocker (e.g. carvedilol (Coreg) or an inotropes (e.g. digoxin, dobutaimine, dopamine Milrinone). In various embodiments the congestive heart failure is categorized as Class II congestive heart failure; the congestive heart failure is categorized as Class III congestive heart failure; and the congestive heart failure is categorized as Class IV congestive heart failure. The New York Heart Association (NYHA) functional classification system relates congestive heart failure symptoms to everyday activities and the patient's quality of life. The NYHA defines the classes of patient symptoms relating to congestive heart failure as: Class II—slight limitation of physical activity, comfortable at rest, but ordinary physical activity results in fatigue, palpitation, or dyspnea; Class III—marked limitation of physical activity, comfortable at rest, but less than ordinary activity causes fatigue, palpitation, or dyspnea and Class IV—unable to carry out any physical activity without discomfort, symptoms of cardiac insufficiency at rest, if any physical activity is undertaken, discomfort is increased. Heart failure treatment using the peptides and methods described herein can also be classified according to the ACC/AHA guidelines (Stage A: At risk for developing heart failure without evidence of cardiac dysfunction; Stage B: Evidence of cardiac dysfunction without symptoms; Stage C: Evidence of cardiac dysfunction with symptoms; and Stage D: Symptoms of heart failure despite maximal therapy).

[0073] Described herein is a method for treating a gastrointestinal disorder, the method comprising administering a peptide comprising, consisting essentially of or consisting of the amino acid sequence of SEQ ID NO:7, e.g., a peptide in FIG. 3a or FIG. 3b. In various embodiments: the patient is suffering from a disorder selected from the group consisting of: gastrointestinal motility disorders, chronic intestinal pseudo-obstruction, colonic pseudo-obstruction, Crohn's disease, duodenogastric reflux, dyspepsia, functional dyspepsia, nonulcer dyspepsia, a functional gastrointestinal disorder, functional heartburn, gastroesophageal reflux disease (GERD), gastroparesis, irritable bowel syndrome, post-operative ileus, ulcerative colitis, chronic constipation, and disorders and conditions associated with constipation (e.g. constipation associated with use of opiate pain killers, post-surgical constipation, and constipation associated with neuropathic disorders as well as other conditions and disorders are described herein); the patient is suffering from a gastrointestinal motility disorder, chronic intestinal pseudo-obstruction, colonic pseudo-obstruction, Crohn's disease, duodenogastric reflux, dyspepsia, functional dyspepsia, nonulcer dyspepsia, a functional gastrointestinal disorder, functional heartburn, gastroesophageal reflux disease (GERD), gastroparesis, inflammatory bowel disease, irritable bowel syndrome (e.g. d-IBS, c-IBS, and/or a-IBS), post-operative ileus, ulcerative colitis, chronic constipation, and disorders and conditions associated with constipation (e.g. constipation associated with use of opiate pain killers, post-surgical constipation, and constipation associated with neuropathic disorders as well as other conditions and disorders are described herein); the patient has been diagnosed with a functional gastrointestinal disorder according to the Rome Criteria (e.g. Rome II), the patient has been diagnosed with irritable bowel syndrome (e.g. (e.g. diarrhea predominant-IBS, constipation predominant-IBS, and/or alternating-IBS), according to the Rome Criteria (e.g. Rome II); the composition is administered orally; the peptide comprises 30 or fewer amino acids, the peptide comprises 20 or fewer amino acids, the peptide comprises no more than 5 amino acids prior to Cys₆; the peptide comprises 14 amino acids, the peptide comprises 13 amino acids; the peptide comprises 150, 140, 130, 120, 110, 100, 90, 80, 70, 60, 50, 40, or 30 or fewer amino acids. In other embodiments, the peptide comprises 20 or fewer amino acids. In other embodiments the peptide comprises no more than 20, 15, 10, or 5 peptides subsequent to Cys₁₈. In certain embodiments Xaa₁₉ is a chymotrypsin or trypsin cleavage site and an analgesic peptide is present immediately following Xaa₁₉.

[0074] Described herein is a method for treating a patient suffering from constipation. Clinically accepted criteria that define constipation include the frequency of bowel movements, the consistency of feces and the ease of bowel movement. One common definition of constipation is less than three bowel movements per week. Other definitions include abnormally hard stools or defecation that requires excessive straining (Schiller 2001, Aliment Pharmacol Ther 15:749-763). Constipation may be idiopathic (functional constipation or slow transit constipation) or secondary to other causes including neurologic, metabolic or endocrine disorders. These disorders include diabetes mellitus, hypothyroidism, hyperthyroidism, hypocalcaemia, Multiple Sclerosis, Parkinson's disease, spinal cord lesions, Neurofibromatosis, autonomic neuropathy, Chagas disease, Hirschsprung's disease and Cystic fibrosis. Constipation may also be the result of surgery (postoperative ileus) or due to the use of drugs such as analgesics (like opioids), antihypertensives, anticonvulsants, antidepressants, antispasmodics and antipsychotics. Also disclosed are methods for increasing gastrointestinal motility in a patient, the method comprising administering to a patient a pharmaceutical composition comprising a purified peptide comprising, consisting of or consisting essentially of the amino acid sequence of SEQ ID NO:7, e.g., a peptide in FIG. 3a or FIG. 3b.

[0075] Also disclosed are methods for increasing the activity of (activating) an intestinal guanylate cyclase (GC-C) receptor in a patient, the method comprising administering to a patient a pharmaceutical composition comprising a purified peptide comprising, consisting of or consisting essentially of the amino acid sequence of SEQ ID NO:7, e.g., a peptide in FIG. 3a or FIG. 3b.

[0076] Also disclosed is an isolated nucleic acid molecule comprising a nucleotide sequence encoding a peptide comprising, consisting of or consisting essentially of SEQ ID NO:7, e.g., a peptide in FIG. 3a or FIG. 3b.

[0077] Also described is a method for treating obesity, the method comprising administering to a patient a pharmaceutical composition comprising or consisting essentially of a purified peptide comprising, consisting of or consisting essentially of the amino acid sequence of SEQ ID NO:7, e.g., a peptide in FIG. 3a or FIG. 3b.

[0078] Also described is a method for treating benign prostatic hyperplasia, the method comprising administering to a patient a pharmaceutical composition comprising a purified peptide comprising, consisting of or consisting essentially of the amino acid sequence of SEQ ID NO:7, e.g., a peptide in FIG. 3a or FIG. 3b. The peptide can be administered alone or in combination with another agent for treatment of BPH, for example, a 5-alpha reductase inhibitor (e.g., finasteride) or an alpha adrenergic inhibitor (e.g., doxazosine).

[0079] Also described is a method for treating or reducing pain, including visceral pain, pain associated with a gastrointestinal disorder or pain associated with some other disorder, the method comprising administering to a patient a pharmaceutical composition comprising or consisting essentially of a purified peptide comprising, consisting of or consisting essentially of the amino acid sequence of SEQ ID NO:7, e.g., a peptide in FIG. 3a or FIG. 3b.

[0080] Also described is a method for treating inflammation, including inflammation of the gastrointestinal tract, e.g., inflammation associated with a gastrointestinal disorder or infection or some other disorder, the method comprising administering to a patient a pharmaceutical composition comprising a purified peptide comprising, consisting of or consisting essentially of the amino acid sequence of SEQ ID NO: 7, e.g., a peptide in FIG. 3a or FIG. 3b.

[0081] In prevention and/or treatment disorders associated with fluid and sodium retention (e.g., heart failure, congestive heart failure, kidney disease, etc), the agents described herein can be administered, for example, via a parenteral route, intravenously, and/or subcutaneously. Intravenous administration may comprise, for example, (1) one or more successive rounds of a bolus followed by an infusion or an infusion followed by a bolus, (2) infusion, and (3) bolus administration. The dosage may vary depending on the administration schedule. Thus, bolus administrations may involve dosing from about 0.1-1000 ug/kg, from about 1-100 ug/kg, or from about 10, 15, 20, 25, or 30 ug/kg. Infusion administrations may involve dosing from about 0.1-1000 ug/kg/hour, from about 1-100 ug/kg/hour, about 10 ug/kg/hour. During the duration of an infusion administration, the dosage may vary (for example, decreasing over time, increasing over time, and combinations thereof) or may remain constant. Subcutaneous administration may involve dosing from about 0.1-1000 ug/kg, from about 1-100 ug/kg, from about 10, 15, 20, 25, or 30 ug/kg.

[0082] As noted above, isolated nucleic acid molecules comprising a sequence encoding a peptide described herein are described. Also described are vectors, e.g., expression vectors that include such nucleic acid molecules and can be used to express a peptide described herein in a cultured cell (e.g., a eukaryotice cell or a prokaryotic cell). The vector can further include one or more regulatory elements, e.g., a heterologous promoter or elements required for translation operably linked to the sequence encoding the peptide. In some cases the nucleic acid molecule will encode an amino acid sequence that includes the amino acid sequence of a peptide described herein. For example, the nucleic acid molecule can encode a preprotein or a preproprotein that can be processed to produce a peptide described herein. In cases where unnatural amino acids are present in the peptides described herein, selector codons can be utilized in the synthesis of such peptides similar to that described in US20060019347 (for example, paragraphs 398-408, 457-499, and 576-588) herein incorporated by reference.

[0083] A vector that includes a nucleotide sequence encoding a peptide described herein or a peptide or peptide comprising a peptide described herein may be either RNA or DNA, single- or double-stranded, prokaryotic, eukaryotic, or viral. Vectors can include transposons, viral vectors, episomes, (e.g., plasmids), chromosomes inserts, and artificial chromosomes (e.g. BACs or YACs). Suitable bacterial hosts for expression of the encode peptide or peptide include, but are not limited to, E. coli. Suitable eukaryotic hosts include yeast such as S. cerevisiae, other fungi, vertebrate cells, invertebrate cells (e.g., insect cells), plant cells, human cells, human tissue cells, and whole eukaryotic organisms. (e.g., a transgenic plant or a transgenic animal). Further, the vector nucleic acid can be used to transfect a virus such as vaccinia or baculovirus (for example using the Bac-to-Bac® Baculovirus expression system (Invitrogen Life Technologies, Carlsbad, Calif.)).

[0084] As noted above the disclosure includes vectors and genetic constructs suitable for production of a peptide described herein or a peptide or peptide comprising such a peptide. Generally, the genetic construct also includes, in addition to the encoding nucleic acid molecule, elements that allow expression, such as a promoter and regulatory sequences. The expression vectors may contain transcriptional control sequences that control transcriptional initiation, such as promoter, enhancer, operator, and repressor sequences. A variety of transcriptional control sequences are well known to those in the art and may be functional in, but are not limited to, a bacterium, yeast, plant, or animal cell. The expression vector can also include a translation regulatory sequence (e.g., an untranslated 5′ sequence, an untranslated 3′ sequence, a poly A addition site, or an internal ribosome entry site), a splicing sequence or splicing regulatory sequence, and a transcription termination sequence. The vector can be capable of autonomous replication or it can integrate into host DNA.

[0085] Also described are isolated host cells harboring one of the forgoing nucleic acid molecules and methods for producing a peptide by culturing such a cell and recovering the peptide or a precursor of the peptide. Recovery of the peptide or precursor may refer to collecting the growth solution and need not involve additional steps of purification. Proteins of the present disclosure, however, can be purified using standard purification techniques, such as, but not limited to, affinity chromatography, thermaprecipitation, immunoaffinity chromatography, ammonium sulfate precipitation, ion exchange chromatography, filtration, electrophoresis and hydrophobic interaction chromatography.

[0086] The peptides can be purified. Purified peptides are peptides separated from other proteins, lipids, and nucleic acids or from the compounds from which is it synthesized. The peptide can constitute at least 10, 20, 50 70, 80 or 95% by dry weight of the purified preparation.

[0087] Also described is a method of increasing the level of cyclic guanosine 3′-monophosphate (cGMP) in an organ, tissue (e.g, the intestinal mucosa), or cell (e.g., a cell bearing GC-A receptor) by administering to a patient a composition comprising or consisting essentially of a purified peptide comprising, consisting of or consisting essentially of the amino acid sequence of SEQ ID NO:7 (e.g., a peptide in FIG. 3a or FIG. 3b).

[0088] Also described is a method for treating hypertension. The method comprises: administering to the patient a pharmaceutical composition comprising, consisting essentially of, or consisting of a peptide or agonist described herein and a pharmaceutically acceptable carrier. The composition can be administered in combination with another agent for treatment of hypertension, for example, a diuretic, an ACE inhibitor, an angiotensin receptor blocker, a beta-blocker, or a calcium channel blocker.

[0089] Also described is a method for treating secondary hyperglycemias in connection with pancreatic diseases (chronic pancreatitis, pancreasectomy, hemochromatosis) or endocrine diseases (acromegaly, Cushing's syndrome, pheochromocytoma or hyperthyreosis), drug-induced hyperglycemias (benzothiadiazine saluretics, diazoxide or glucocorticoids), pathologic glucose tolerance, hyperglycemias, dyslipoproteinemias, adiposity, hyperlipoproteinemias and/or hypotensions is described. The method comprises: administering to the patient a pharmaceutical composition comprising, consisting essentially of, or consisting of a peptide or agonist described herein and a pharmaceutically acceptable carrier.

[0090] The peptides described herein can be present with a counterion. Useful counterions include salts of: acetate, benzenesulfonate, benzoate, calcium edetate, camsylate, carbonate, citrate, edetate (EDTA), edisylate, embonate, esylate, fumarate, gluceptate, gluconate, glutamate, glycollylarsanilate, hexylresorcinate, iodide, bromide, chloride, hydroxynaphthoate, isethionate, lactate, lactobionate, estolate, maleate, malate, mandelate, mesylate, mucate, napsylate, nitrate, pantothenate, phosphate, salicylate, stearate, succinate, sulfate, tartarate, tartrate, hydrochlorate, theoclate, acetamidobenzoate, adipate, alginate, aminosalicylate, anhydromethylenecitrate, ascorbate, aspartate, camphorate, caprate, caproate, caprylate, cinnamate, cyclamate, dichloroacetate, formate, gentisate, glucuronate, glycerophosphate, glycolate, hippurate, fluoride, malonate, napadisylate, nicotinate, oleate, orotate, oxalate, oxoglutarate, palmitate, pectinate, pectinate polymer, phenylethylbarbiturate, picrate, propionate, pidolate, sebacate, rhodanide, tosylate, and tannate.

[0091] Also described are methods for producing any of the forgoing peptides comprising providing a cell harboring a nucleic acid molecule encoding the peptide, culturing the cell under conditions in which the peptide is expressed, and isolating the expressed peptide.

[0092] Also described are methods for producing any of the forgoing peptides comprising chemically synthesizing the peptide and then purifying the synthesized peptide. Also described are pharmaceutical compositions comprising the forgoing peptides. Also described are nucleic acid molecules encoding any of the forgoing peptides, vectors (e.g., expression vectors) containing such nucleic acid molecules and host cells harboring the nucleic acid molecules or vectors.

### Metabolites of Asparagine

[0093] In some cases an asparagine (Asn) of a peptide described herein can be metabolized to have a different structure and the GC receptor agonist containing such a metabolite of Asn may retain activity. Peptides where one or more Asn, e.g., one or more Asn of an embodiment of SEQ ID NO:7, e.g., a peptide in FIG. 3a or FIG. 3b described herein are replaced by a metabolite of Asn can be useful in the methods described herein and can be present in a pharmaceutical composition that optionally contains one or more additional active ingredients.

[0094] For example, one or more Asn of a peptide and the peptide bond carboxy terminal thereto having the structure:

[chemical structure]

can replaced by a group having a structure selected from:

[chemical structure]

[0095] Thus, the Asn and the peptide bond carboxy terminal there to can be replaced by a cyclic imide:

[chemical structure]

### Asp:

[chemical structure]

[0097] The Asp can be L-Asp or D-Asp. The isoAsn can be D-isoAsn or L-isoAsn.

[0098] Considering the asparagine only, one or more Asn having the structure:

[chemical structure]

[0099] can be optionally replaced by a group having a structure selected from (a), (b) and (c):

[chemical structure]

provided that an Asn at the carboxy terminus is not replaced by structure (a) or structure (c). When the Asn is at the carboxy terminus of the peptide, structure (a) cannot form. Since structure (c) is formed through structure (a), structure (c) cannot be formed when the Asn is at the carboxy terminus.

[0100] The formation of the various metabolites of Asp is depicted below.

[chemical structure]

[0101] The details of one or more embodiments described herein are set forth in the accompanying description. All of the publications, patents and patent applications are hereby incorporated by reference.

### FIGURES

[0102] FIG. 1 depicts the results of studies on certain peptides tested in the intestinal GC-C receptor activity assay.

[0103] FIG. 2 depicts the results of studies on certain peptides tested in the rat diuresis assay.

[0104] FIGS. 3a and 3b depict certain peptides within SEQ ID NO:7.

[0105] FIG. 4 depicts various pre, pro, N-terminal non-core, and C-terminal non-core sequences that can be included in a peptide comprising SEQ ID NO:7.

### DETAILED DESCRIPTION

[0106] The peptides described herein bind to the intestinal guanylate cyclase (GC-C) receptor, a regulator of fluid and electrolyte balance. The apical membrane of the intestinal epithelial surface is a major site of GC-C receptor expression. Activation of the GC-C receptor in the intestine leads to an increase in intestinal epithelial cyclic GMP (cGMP). This increase in cGMP is believed to cause a decrease in water and sodium absorption and an increase in chloride and potassium ion secretion, leading to changes in intestinal fluid and electrolyte transport and increased intestinal motility. The intestinal GC-C receptor possesses an extracellular ligand binding region, a transmembrane region, an intracellular protein kinase-like region and a cyclase catalytic domain. Proposed functions for the GC-C receptor are fluid and electrolyte homeostasis, the regulation of epithelial cell proliferation and the induction of apoptosis (Shalubhai 2002 Curr Opin Drug Dis Devel 5:261-268).

[0107] In addition to being expressed in the intestine by gastrointestinal epithelial cells, GC-C is expressed in extra-intestinal tissues including kidney, lung, pancreas, pituitary, adrenal, developing liver and gall bladder (reviewed in Vaandrager 2002 Mol Cell Biochem 230:73-83, Kulaksiz et al. 2004, Gastroenterology 126:732-740) and male and female reproductive tissues (reviewed in Vaandrager 2002 Mol Cell Biochem 230:73-83). This suggests that the GC-C receptor agonists can be used in the treatment of disorders outside the GI tract, for example, congestive heart failure and benign prostatic hyperplasia.

[0108] In humans, the GC-C receptor is activated by guanylin (Gn) (U.S. Pat. No. 5,969,097), uroguanylin (Ugn) (U.S. Pat. No. 5,140,102) and lymphoguanylin (Forte et al. 1999 Endocrinology 140:1800-1806). Interestingly, these agents are 10-100 fold less potent than a class of bacterially derived peptides, termed ST (reviewed in Gianella 1995 J Lab Clin Med 125:173-181). ST peptides are considered super agonists of GC-C and are very resistant to proteolytic degradation.

[0109] ST peptide is capable of stimulating the enteric nervous system (Rolfe et al., 1994, J Physiolo 475: 531-537; Rolfe et al. 1999 Gut 44: 615-619; Nzegwu et al. 1996 Exp Physiol 81: 313-315). Also, cGMP has been reported to have antinociceptive effects in multiple animal models of pain (Lazaro Ibanez et al. 2001 Eur J Pharmacol 426: 39-44; Soares et al. 2001 British J Pharmacol 134: 127-131; Jain et al. 2001 Brain Res 909:170-178; Amarante et al. 2002 Eur J Pharmacol 454:19-23). Thus, GC-C agonists may have both an analgesic as well an anti-inflammatory effect.

[0110] In bacteria, ST peptides are derived from a preproprotein that generally has at least 70 amino acids. The pre and pro regions are cleaved as part of the secretion process, and the resulting mature protein, which generally includes fewer than 20 amino acids, is biologically active.

[0111] Among the known bacterial ST peptides are: E. coli ST Ib (Moseley et al. 1983 Infect. Immun. 39:1167) having the mature amino acid sequence Asn Ser Ser Asn Tyr Cys Cys Glu Leu Cys Cys Asn Pro Ala Cys Thr Gly Cys Tyr (SEQ ID NO:_); E. coli ST Ia (So and McCarthy 1980 Proc. Natl. Acad. Sci. USA 77:4011) having the mature amino acid sequence Asn Thr Phe Tyr Cys Cys Glu Leu Cys Cys Asn Pro Ala Cys Ala Gly Cys Tyr (SEQ ID NO:7). E. coli ST I* (Chan and Giannella 1981 J. Biol. Chem. 256:7744) having the mature amino acid sequence Asn Thr Phe Tyr Cys Cys Glu Leu Cys Cys Tyr Pro Ala Cys Ala Gly Cys Asn (SEQ ID NO:_); C. freundii ST peptide (Guarino et al. 1989b Infect. Immun. 57:649) having the mature amino acid sequence Asn Thr Phe Tyr Cys Cys Glu Leu Cys Cys Asn Pro Ala Cys Ala Gly Cys Tyr (SEQ ID NO:_); Y. enterocolitica ST peptides, Y-ST(Y-STa), Y-STb, and Y-STc (reviewed in Huang et al. 1997 Microb. Pathog. 22:89) having the following pro-form amino acid sequences: Gln Ala Cys Asp Pro Pro Ser Pro Pro Ala Glu Val Ser Ser Asp Trp Asp Cys Cys Asp Val Cys Cys Asn Pro Ala Cys Ala Gly Cys (SEQ ID NO:_) (as well as a Ser-7 to Leu-7 variant of Y-STa (SEQ ID NO:_), (Takao et al. 1985 Eur. J. Biochem. 152:199)); Lys Ala Cys Asp Thr Gln Thr Pro Ser Pro Ser Glu Glu Asn Asp Asp Trp Cys Cys Glu Val Cys Cys Asn Pro Ala Cys Ala Gly Cys (SEQ ID NO:); Gln Glu Thr Ala Ser Gly Gln Val Gly Asp Val Ser Ser Ser Thr Ile Ala Thr Glu Val Ser Glu Ala Glu Cys Gly Thr Gln Ser Ala Thr Thr Gln Gly Glu Asn Asp Trp Asp Trp Cys Cys Glu Leu Cys Cys Asn Pro Ala Cys Phe Gly Cys (SEQ ID NO:_), respectively; Y. kristensenii ST peptide having the mature amino acid sequence Ser Asp Trp Cys Cys Glu Val Cys Cys Asn Pro Ala Cys Ala Gly Cys (SEQ ID NO:_); V. cholerae non-01 ST peptide (Takao et al. (1985) FEBS lett. 193:250) having the mature amino acid sequence Ile Asp Cys Cys Glu Ile Cys Cys Asn Pro Ala Cys Phe Gly Cys Leu Asn (SEQ ID NO:_); and V. mimicus ST peptide (Arita et al. 1991 FEMS Microbiol. Lett. 79:105) having the mature amino acid sequence Ile Asp Cys Cys Glu Ile Cys Cys Asn Pro Ala Cys Phe Gly Cys Leu Asn (SEQ ID NO:_). The immature (including pre and pro regions) form of E. coli ST-1A (ST-P) protein has the sequence:

mkklmlaifisvlsfpsfsqstesldsskekitletkkcdvvknnsekksenmnntfyccelccnpacagcy (SEQ ID NO:_; see GenBank® Accession No. P01559 (gi:123711). The pre sequence extends from aa 1-19. The pro sequence extends from aa 20-54. The mature protein extends from 55-72. The immature (including pre and pro regions) form of E. coli ST-1B (ST-H) protein has the sequence:
mkksilfiflsvlsfspfaqdakpvesskekitleskkcniakksnksgpesmnssnyccelccnpactgcy (SEQ ID NO:_; see GenBank® Accession No. P07965 (gi:3915589)). The immature (including pre and pro regions) form of Y. enterocolitica ST protein has the sequence:
mkkivfvlvlmlssfgafgqetvsgqfsdalstpitaevykqacdpplppaevssdwdccdvccnpacagc (SEQ ID NO:_; see GenBank® Accession No. S25659 (gi:282047)). The peptides described herein, e.g., a peptide comprising SEQ ID NO:77 (e.g., a peptide of FIG. 3a or FIG. 3b)can include all or part of such pre and/or pro sequences.

[0112] FIG. 4 depicts various pre, pro, N-terminal non-core, and C-terminal non-core sequences that can be included in a peptide comprising SEQ ID NO:7 (e.g., a peptide of FIG. 3a or FIG. 3b). Thus, a peptide can include the amino acid sequence:
[0113] A′-B′-C′-D′-E′ wherein:
[0114] A′ is an amino acid sequence comprising a pre sequence depicted in FIG. 4 or is missing;
[0115] B′ is an amino acid sequence comprising a pro sequence depicted in FIG. 4 or is missing;
[0116] C′ is an amino acid sequence comprising an N-terminal non-core sequence depicted in FIG. 4 or is missing;
[0117] D′ is an amino acid sequence comprising a GC-C receptor agonist peptide amino acid sequence (e.g., SEQ ID NO:7, a peptide in FIG. 3a or a peptide in FIG. 3b); and
[0118] E′ is an amino acid sequence comprising a C-terminal non-core sequence depicted in FIG. 4 or is missing;

[0119] The peptides described herein, like the bacterial ST peptides, have six Cys (or D-Cys) residues. These six residues form three disulfide bonds in the mature and active form of the peptide. If the six Cys (or D-Cys) residues are identified, from the amino to carboxy terminus of the peptide, as A, B, C, D, E, and F, then the disulfide bonds form as follows: A-D, B-E, and C-F. The formation of these bonds is thought to be important for GC-C receptor binding.

[0120] Certain of the peptides described herein may include analgesic or antinociceptive tags such as the carboxy-terminal sequence AspPhe immediately following a Trp, Tyr or Phe that creates a functional chymotrypsin cleavage site or following Lys or Arg that creates a functional trypsin cleavage site. Chymotrypsin in the intestinal tract can potentially cleave such peptides immediately carboxy terminal to the Trp, Phe or Tyr residue, releasing the dipeptide, AspPhe. This dipeptide has been shown to have analgesic activity in animal models (Abdikkahi et al. 2001 Fundam Clin Pharmacol 15:117-23; Nikfar et al 1997, 29:583-6; Edmundson et al 1998 Clin Pharmacol Ther 63:580-93). In this manner such peptides can treat both pain and inflammation. Other analgesic peptides can be present at the amino or carboxy terminus of the peptide (e.g., following a functional cleavage site) including: endomorphin-1, endomorphin-2, nocistatin, dalargin, lupron, and substance P.

[0121] In some cases, the peptides described herein are produced as a prepro protein that includes the amino terminal leader sequence:

mkksilfiflsvlsfspfaqdakpvesskekitleskkcniakksnksgpesmn. Where the peptide is produced by a bacterial cell, e.g., E. coli, the forgoing leader sequence will be cleaved and the mature peptide will be efficiently secreted from the bacterial cell. U.S. Pat. No. 5,395,490 describes vectors, expression systems and methods for the efficient production of ST peptides in bacterial cells and methods for achieving efficient secretion of mature ST peptides. The vectors, expression systems and methods described in U.S. Pat. No. 5,395,490 can be used to produce the ST peptides and variant ST peptides of the present disclosure

### Variant Peptides

[0122] The disclosure includes variant peptides which can include one, two, three, four, five, six, seven, eight, nine, or ten (in some embodiments fewer than 5 or fewer than 3 or 2 or fewer) amino acid substitutions and/or deletions compared to the sequences of SEQ ID NO:7 (e.g., a sequence in FIG. 3a or FIG. 3b) The substitution(s) can be conservative or non-conservative. The naturally-occurring amino acids can be substituted by D-isomers of any amino acid, non-natural amino acids, natural and natural amino acid analogs and other groups. A conservative amino acid substitution results in the alteration of an amino acid for a similar acting amino acid, or amino acid of like charge, polarity, or hydrophobicity. At some positions, even conservative amino acid substitutions can alter the activity of the peptide. A conservative substitution can substitute a naturally-occurring amino acid for a non-naturally-occurring amino acid. The amino acid substitutions among naturally-occurring amino acids are listed in Table II.

TABLE II

| For Amino Acid | Code | Replace with any of |
|---|---|---|
| Alanine | Ala | Gly, Cys, Ser |
| Arginine | Arg | Lys, His |
| Asparagine | Asn | Asp, Glu, Gln, |
| Aspartic Acid | Asp | Asn, Glu, Gln |
| Cysteine | Cys | Met, Thr, Ser |
| Glutamine | Gln | Asn, Glu, Asp |
| Glutamic Acid | Glu | Asp, Asn, Gln |
| Glycine | Gly | Ala |
| Histidine | His | Lys, Arg |
| Isoleucine | Ile | Val, Leu, Met |
| Leucine | Leu | Val, Ile, Met |
| Lysine | Lys | Arg, His |
| Methionine | Met | Ile, Leu, Val |
| Phenylalanine | Phe | Tyr, His, Trp |
| Proline | Pro | |
| Serine | Ser | Thr, Cys, Ala |
| Threonine | Thr | Ser, Met, Val |
| Tryptophan | Trp | Phe, Tyr |
| Tyrosine | Tyr | Phe, His |
| Valine | Val | Leu, Ile, Met |

[0123] In some circumstances it can be desirable to treat patients with a variant peptide that binds to and activates intestinal GC-C receptor, but is less active than the non-variant form the peptide. This reduced activity can arise from reduced affinity for the receptor or a reduced ability to activate the receptor once bound or reduced stability of the peptide.

### Production of Peptides

[0124] Useful peptides can be produced either in bacteria including, without limitation, E. coli, or in other existing systems for peptide or protein production (e.g., Bacillus subtilis, baculovirus expression systems using Drosophila Sf9 cells, yeast or filamentous fungal expression systems, mammalian cell expression systems), or they can be chemically synthesized.

[0125] If the peptide or variant peptide is to be produced in bacteria, e.g., E. coli, the nucleic acid molecule encoding the peptide will preferably also encode a leader sequence that permits the secretion of the mature peptide from the cell. Thus, the sequence encoding the peptide can include the pre sequence and the pro sequence of, for example, a naturally-occurring bacterial ST peptide. The secreted, mature peptide can be purified from the culture medium.

[0126] The sequence encoding a peptide described herein is preferably inserted into a vector capable of delivering and maintaining the nucleic acid molecule in a bacterial cell. The DNA molecule may be inserted into an autonomously replicating vector (suitable vectors include, for example, pGEM3Z and pcDNA3, and derivatives thereof). The vector nucleic acid may be a bacterial or bacteriophage DNA such as bacteriophage lambda or M13 and derivatives thereof. Construction of a vector containing a nucleic acid described herein can be followed by transformation of a host cell such as a bacterium. Suitable bacterial hosts include but are not limited to, E. coli, B. subtilis, Pseudomonas, Salmonella. The genetic construct also includes, in addition to the encoding nucleic acid molecule, elements that allow expression, such as a promoter and regulatory sequences. The expression vectors may contain transcriptional control sequences that control transcriptional initiation, such as promoter, enhancer, operator, and repressor sequences. A variety of transcriptional control sequences are well known to those in the art. The expression vector can also include a translation regulatory sequence (e.g., an untranslated 5′ sequence, an untranslated 3′ sequence, or an internal ribosome entry site). The vector can be capable of autonomous replication or it can integrate into host DNA to ensure stability during peptide production.

[0127] The protein coding sequence that includes a peptide described herein can also be fused to a nucleic acid encoding a peptide affinity tag, e.g., glutathione S-transferase (GST), maltose E binding protein, protein A, FLAG tag, hexa-histidine, myc tag or the influenza HA tag, in order to facilitate purification. The affinity tag or reporter fusion joins the reading frame of the peptide of interest to the reading frame of the gene encoding the affinity tag such that a translational fusion is generated. Expression of the fusion gene results in translation of a single peptide that includes both the peptide of interest and the affinity tag. In some instances where affinity tags are utilized, DNA sequence encoding a protease recognition site will be fused between the reading frames for the affinity tag and the peptide of interest.

[0128] Genetic constructs and methods suitable for production of immature and mature forms of the peptides and variants described herein in protein expression systems other than bacteria, and well known to those skilled in the art, can also be used to produce peptides in a biological system.

[0129] Mature peptides and variants thereof can be synthesized by the solid-phase chemical synthesis. For example, the peptide can be synthesized on Cyc(4-CH₂ Bx1)-OCH₂-4-(oxymethyl)-phenylacetamidomethyl resin using a double coupling program. Protecting groups must be used appropriately to create the correct disulfide bond pattern. For example, the following protecting groups can be used: t-butyloxycarbonyl (alpha-amino groups); acetamidomethyl (thiol groups of Cys residues B and E); 4-methylbenzyl (thiol groups of Cys residues C and F); benzyl (y-carboxyl of glutamic acid and the hydroxyl group of threonine, if present); and bromobenzyl (phenolic group of tyrosine, if present). Coupling is effected with symmetrical anhydride of t-butoxylcarbonylamino acids or hydroxybenzotriazole ester (for asparagine or glutamine residues), and the peptide is deprotected and cleaved from the solid support in hydrogen fluoride, dimethyl sulfide, anisole, and p-thiocresol using 8/1/1/0.5 ratio (v/v/v/w) at 0° C. for 60 min. After removal of hydrogen fluoride and dimethyl sulfide by reduced pressure and anisole and p-thiocresol by extraction with ethyl ether and ethyl acetate sequentially, crude peptides are extracted with a mixture of 0.5M sodium phosphate buffer, pH 8.0 and N,N-dimethyl formamide using 1/1 ratio, v/v. The disulfide bond for Cys residues B and E is the formed using dimethyl sulfoxide (Tam et al. (1991) J. Am. Chem. Soc. 113:6657-62). The resulting peptide is the purified by reverse-phase chromatography. The disulfide bond between Cys residues C and F is formed by first dissolving the peptide in 50% acetic acid in water. Saturated iodine solution in glacial acetic acid is added (1 ml iodine solution per 100 ml solution). After incubation at room temperature for 2 days in an enclosed glass container, the solution is diluted five-fold with deionized water and extracted with ethyl ether four times for removal of unreacted iodine. After removal of the residual amount of ethyl ether by rotary evaporation the solution of crude product is lyophilized and purified by successive reverse-phase chromatography.

[0130] Peptides can also be synthesized by many other methods including solid phase synthesis using traditional FMOC protection (i.e., coupling with DCC—HOBt and deprotection with piperidine in DMF). Cys thiol groups can be trityl protected. Treatment with TFA can be used for final deprotection of the peptide and release of the peptide from the solid-state resin. In many cases air oxidation is sufficient to achieve proper disulfide bond formation.

### Example 1

### Preparation of Peptides

[0131] Peptides can be recombinantly produced in bacteria as follows. T7 expression vectors, pET26b(+) (Novagen) expressing the peptide of interest are constructed using standard molecular biology techniques and are transformed into E. coli bacterial host BL21λ. DE3 (Invitrogen). A single colony is innoculated and grown shaking overnight at 30° C. in L broth+25 mg/l kanamycin. The overnight culture is added to 3.2 L of batch medium (Glucose 25 g/l, Casamino Acids 5 g/l, Yeast Extract 5 g/l, KH₂PO₄ 13.3 g/l, (NH₄)₂HPO₄ 4 g/l, MgSO₄-7H₂0 1.2 g/l, Citric Acid 1.7 g/l, EDTA 8.4 mg/l, CoCl₂-6H₂O 2.5 mg/l, MnCl₂-4H₂O 15 mg/l, CuCl₂-4H₂O 1.5 mg/l, H₃BO₃ 3 mg/l, Na₂MoO₄-2H₂0 2.5 mg/l, Zn Acetate-2H₂O 13 mg/l, Ferric Citrate 100 mg/l, Kanamycin 25 mg/l, Antifoam DF₂0₄ 1 ml/l) and fermented using the following process parameters: pH 6.7—control with base only (28% NH₄OH), 30° C., aeration: 5 liters per minute. After the initial consumption of batch glucose (based on monitoring dissolved oxygen (DO) levels), 1.5 L of feed medium (Glucose 700 g/l, Casamino Acids 10 g/l, Yeast Extract 10 g/l, MgSO₄-7H₂O 4 g/l, EDTA 13 mg/l, CoCl₂-6H₂O 4 mg/l, MnCl₂-4H₂O 23.5 mg/l, CuCl₂-4H₂O 2.5 mg/l, H₃BO₃ 5 mg/l, Na₂MoO4-2H₂0 4 mg/l, Zn Acetate-2H₂0 16 mg/l, Ferric Citrate 40 mg/l, Antifoam DF₂0₄ 1 ml/l) is added at a feed rate controlled to maintain 20% DO. IPTG is added to 0.2 mM 2 hours post feed start. The total run time is approximately 40-45 hours (until feed exhaustion).

[0132] Cells are collected by centrifugation at 5,000 g for 10 minutes. The cell pellet is discarded and the supernatant is passed through a 50 Kd ultrafiltration unit. The 50 Kd filtrate (0.6 liters) is loaded onto a 110 ml Q-Sepharose fast Flow column (Amersham Pharmacia, equilibrated with 20 mM Tris-HCl pH 7.5) at a flow rate of 400 ml/hour. The column is washed with six volumes of 20 mM Tris-HCl pH 7.5 and proteins are eluted with 50 mM acetic acid collecting 50 ml fractions. Fractions containing peptide are pooled and the solvent is removed by rotary evaporation. The dried proteins are resuspended in 10 ml of 8% acetic acid, 0.1% trifluoroacetic acid (TFA) and loaded onto a Varian Polaris C18-A column (250×21.2 mm 10 μm, equilibrated in the same buffer) at a flow rate of 20 ml/min. The column is washed with 100 ml of 8% methanol, 0.1% TFA and developed with a gradient (300 ml) of 24 to 48% methanol, 0.1% TFA, collecting 5-ml fractions. Fractions containing peptide are pooled and the solvent is removed by rotary evaporation. The peptides are dissolved in 0.1% TFA and lyophilized.

[0133] Peptide fractions are analyzed by standard LCMS and HPLC. Peptides can also be chemically synthesized by a commercial peptide synthesis company.

### Example 2

### Activation of the Intestinal GC-C Receptor by Peptides

[0134] The ability of peptides to activate the intestinal GC-C receptor was assessed in an assay employing the T84 human colon carcinoma cell line (American Type Culture Collection (Bethesda, Md.)). For the assays cells were grown to confluency in 24-well culture plates with a 1:1 mixture of Ham's F12 medium and Dulbecco's modified Eagle's medium (DMEM), supplemented with 5% fetal calf serum and were used at between passages 54 and 60.

[0135] Briefly, monolayers of T84 cells in 24-well plates were washed twice with 1 ml/well DMEM, then incubated at 37° C. for 10 min with 0.45 ml DMEM containing 1 mM isobutylmethylxanthine (1BMX), a cyclic nucleotide phosphodiesterase inhibitor. Test peptides (50 μl) were then added and incubated for 30 minutes at 37° C. The media was aspirated and the reaction was then terminated by the addition of ice cold 0.5 ml of 0.1N HCl. The samples were held on ice for 20 minutes and then evaporated to dryness using a heat gun or vacuum centrifugation. The dried samples were resuspended in 0.5 ml of phosphate buffer provided in the Cayman Chemical Cyclic GMP EIA kit (Cayman Chemical, Ann Arbor, Mich.). Cyclic GMP was measured by EIA according to procedures outlined in the Cayman Chemical Cyclic GMP EIA kit. FIG. 1 shows the activity of chemically synthesized peptide variants (depicted below) in the GC-C receptor activity assay. EC₅₀ is defined as the concentration by which 50% of the maximal activity is seen. Maximum cGMP level in assay is determined as the activity of the positive ST control, Cys-Cys-Glu-Leu-Cys-Cys-Asn-Pro-Ala-Cys-Thr-Gly-Cys-Tyr SEQ ID NO:6 and set to 100%. The positive control was tested twice in this assay.

### Example 3

### Diuresis and Naturesis Assays

[0136] Effect on Diuresis and Natriuresis

[0137] The effect of peptides/GC-agonists described herein on diuresis and natriuresis can be determined using methodology similar to that described in WO06/001931 (examples 6 (p. 42) and 8 (p. 45)). Briefly, a peptide described herein (180-pmol) is infused for 60 min into a group of 5 anesthetized rats. Given an estimated rat plasma volume of 10 mL, the infusion rate is approximately 3 pmol/mL/min. Blood pressure, urine production, and sodium excretion are monitored for approximately 40 minutes prior to the infusion, during the infusion, and for approximately 50 minutes after the infusion to measure the effect of the peptide/GC-C agonist on diuresis and natriuresis. For comparison, a control group of five rats is infused with regular saline. Urine and sodium excretion can be assessed. Dose response can also be determined. A peptide/GC-C agonist described herein is infused intravenously into rats over 60 minutes. Urine is collected at 30 minute intervals up to 180 minutes after termination of peptide/GC-C agonist infusion, and urine volume, sodium excretion, and potassium excretion are determined for each collection interval. Blood pressure is monitored continuously. For each dose a dose-response relationship for urine volume, sodium and potassium excretion can be determined. Plasma concentration of the peptide/GC-agonist is also determined before and after iv infusion.

[0138] Rat Diuresis Experiment

[0139] Female Sprague-Dawley rats (>170 g, 2-8 per group), are given 3.0 mL of iosotonic saline perorally, and then anesthetized with isoflurane/oxygen. Once an appropriate level of anesthesia has been achieved, a sterile polyurethane catheter (˜16 cm, 0.6 mm ID, 0.9 mm OD) is inserted 1.5-2.0 cm into the urethra and secured using 1-2 drops of veterinary bond adhesive applied to urethra/catheter junction. Rats are then dosed with either vehicle or test article via the intravenous or intraperitoneal route. Rats are then placed in appropriately sized rat restraint tubes, with the catheter protruding out of the restraint tube into a 10 mL graduated cylinder. Rats are allowed to regain consciousness, and the volume of urine excreted over a 1-5 hour duration is recorded periodically for each rat.

[0140] FIG. 2 shows the results of several peptides described herein tested in the rat diuresis assay.

### Example 4

### Kd Determination and Binding Assays

[0141] A competition binding assay can be performed using rat intestinal epithelial cells to determine the affinity of a peptide for intestinal GC-G receptor. Epithelial cells from the small intestine of rats are obtained as described by Kessler et al. (J. Biol. Chem. 245: 5281-5288 (1970)). Briefly, animals are sacrificed and their abdominal cavities exposed.

[0142] The small intestine is rinsed with 300 ml ice cold saline or PBS. 10 cm of the small intestine measured at 10 cm from the pylorus is removed and cut into 1 inch segments. Intestinal mucosa is extruded from the intestine by gentle pressure between a piece of parafilm and a P-1000 pipette tip. Intestinal epithelial cells are placed in 2 ml PBS and pipetted up and down with a 5 ml pipette to make a suspension of cells. Protein concentration in the suspension is measured using the Bradford method (Anal. Biochem. 72: 248-254 (1976)).

[0143] A competition binding assay can be performed based on the method of Giannella et al. (Am. J. Physiol. 245: G492-G498) between [¹²⁵I] labeled peptide. The assay mixture contains: 0.5 ml of DME with 20 mM HEPES-KOH pH 7.0, 0.9 mg of the cell suspension listed above, 21.4 fmol [¹²⁵I]-SEQ ID NO:4 (42.8 pM), and different concentrations of competitor peptide (0.01 to 1000 nM). The mixture is incubated at room temperature for 1 hour, and the reaction is stopped by applying the mixture to GF/B glass-fiber filters (Whitman). The filters are washed with 5 ml ice-cold PBS and radioactivity is measured. Giannella et al. (Am. J. Physiol. 245: G492-G498) observed that the Kd for wild-type ST peptide in this same assay is ˜13 nm.

[0144] Similar competition binding assays can be performed in intestinal epithelial cells from wild-type and guanylate cyclase C knockout (GC-C KO; Mann et al. 1997 Biochem and Biophysical Research Communications 239:463) mice. Mouse intestinal epithelial cells are prepared as described above for rat intestinal epithelial cells except the cells are homogenized with an Omni homogenizer for 20 seconds on the maximum setting to make a suspension of cells.

[0145] The binding of peptides to GC-C receptors on the cell surface of human colonic cells (T84 cells; ATCC Catalog No. CCL-248) can be characterized in a competitive radioligand-binding assay at pH conditions of 5, 7 and 8. The radiolabeled tracer used in these experiments is ¹²⁵I-labeled control peptide. To determine binding constants, competitive inhibition of binding is used. T84 cells are cultured in T-150 plastic flasks in DMEM and Ham's F-12 medium containing 5% fetal bovine serum. Monolayers at 60-70% confluency (approximately 10⁷ cells) are collected by gentle scraping followed by centrifugation, and washed twice in 50 mL of phosphate-buffered saline (PBS). The cells are resuspended in 1 mL DMEM containing 20 mM N-(2-hydroxymethyl)piperazine-N′-(2-ethanesulfonic acid) (Hepes), pH 7.0 and 0.5% bovine serum albumin (BSA). T84 cells are incubated with a constant amount of ¹²⁵I-control peptide containing various concentrations of cold competitor. Free ¹²⁵I-control peptide is separated from bound tracer by rapid suction filtration. The binding reactions are carried out in 1.5 mL microfuge tubes in 0.24 mL of DMEM/20 mM Hepes pH 7.0/0.5% BSA containing: 2.5×10⁵ T84 cells (0.25 mg protein), 200,000 cpm ¹²⁵I-control peptide (41 fmol, 170 pM), and 0.01 to 1,000 nM competitor. Binding assays at pH 5.0 are done in DMEM/20 mM 2-(N-morpholino) ethanesulfonic acid (Mes), pH 5.0. Binding assays in pH 8.0 are done in DMEM/20 mM Hepes/50 mM sodium bicarbonate pH 8.0. One sample contains no competitor (B₀) and another contained no cells. After incubation at 37° C. for 1 h, the reaction mixtures are applied to Whatman GF/B glass-fiber filters by suction filtration. The filters are then rinsed with 10 mL ice-cold PBS buffer, inserted into plastic tubes, and added to 2 mL scintillation fluid. Radioactivity is measured in a LS 6500 liquid scintillation counter (Beckman-Coulter). The percent bound in each sample is calculated by the equation:

% B/B₀=(sample cpm−no cells cpm)×100/(B₀ cpm−no cells cpm)

[0146] Nonlinear regression analysis of the binding data is used to calculate the concentration of competitor that resulted in 50% radioligand bound (IC₅₀). The apparent dissociation equilibrium constant (Kᵢ) for each competitor is obtained from the IC₅₀ values and the previously reported estimate of the dissociation constant for the radioligand, K_{d}≅15 nM (Hamra et al. 1997 PNAS 2705-10) and the method of Cheng and Prusoff 1973 Biochem Pharmacol 22:3099-108. Using a two site model, high and low affinity-binding sites are identified on T84 cells (Kᵢ₁ and Kᵢ₂) for all the test agents.

### Example 5

### Pharmacokinetic Properties of Peptides

[0147] To study the pharmacokinetics of peptides, absorbability studies in mice are performed by administering a peptide intravaneously via tail vein injection or orally by gavage to 8-week-old CD1 mice. Serum is collected from the animals at various time points and tested for the presence of peptide using a competitive enzyme-linked immunoabsorbent assay.

[0148] A similar bioavailability study can be performed in which LCMS rather than ELISA is used to detect peptide. Initially, serum samples are extracted from the whole blood of exposed and control mice, then injected directly (10 mL) onto an in-line solid phase extraction (SPE) column (Waters Oasis HLB 25 μm column, 2.0×15 mm direct connect) without further processing. The sample on the SPE column is washed with a 5% methanol, 95% dH₂O solution (2.1 mL/min, 1.0 minute), then loaded onto an analytical column using a valve switch that places the SPE column in an inverted flow path onto the analytical column (Waters Xterra MS C8 5 μm IS column, 2.1×20 mm). The sample is eluted from the analytical column with a reverse phase gradient (Mobile Phase A: 10 mM ammonium hydroxide in dH₂O, Mobile Phase B: 10 mM ammonium hydroxide in 80% acetonitrile and 20% methanol; 20% B for the first 3 minutes then ramping to 95% B over 4 min. and holding for 2 min., all at a flow rate of 0.4 mL/min.). At 9.1 minutes, the gradient returns to the initial conditions of 20% B for 1 min. Peptide is eluted from the analytical column, and it is detected by triple-quadrapole mass spectrometry. Instrument response is converted into concentration units by comparison with a standard curve using known amounts of chemically synthesized peptide prepared and injected in mouse serum using the same procedure.

[0149] Similarly, oral bioavailabity is determined in rats using LCMS methodology. Rat plasma samples containing peptide are extracted using a Waters Oasis MAX 96 well solid phase extraction (SPE) plate. A 200 μL volume of rat plasma is mixed with 200 μL of ¹³C, ¹⁵N-peptide in the well of a prepared SPE plate. The samples are drawn through the stationary phase with 15 mm Hg vacuum. All samples are rinsed with 200 μL of 2% ammonium hydroxide in water followed by 200 μL of 20% methanol in water. The samples are eluted with consecutive 100 μL volumes of May 20, 1975 formic acid/water/methanol and 100 μL May 15, 1980 formic acid/water/methanol. The samples are dried under nitrogen and resuspended in 100 μL of 20% methanol in water. Samples are analyzed by a Waters Quattro Micro mass spectrometer coupled to a Waters 1525 binary pump with a Waters 2777 autosampler. A 40 μL volume of each sample is injected onto a Thermo Hypersil GOLD C18 column (2.1×50 mm, 5 μm). Peptides are eluted by a gradient over 3 minutes with acetonitrile and water containing 0.05% trifluoroacetic acid.

[0150] Oral bioavailability can also be determined using a radioimmunoassay (RIA) detection method. Female CD-1 mice (Charles River, Wilmington, Mass.) weighing approximately 25 g (7-8 weeks old) or female CD rats (Charles River, Wilmington, Mass.) weighing approximately 153 g are included in this study. Monoclonal antibody recognizing the peptide and ¹²⁵I labeled-peptide, a labeled tracer, are used in these experiments. Animals are fasted overnight before administration of compounds. Blood is drawn from all dosed animals by retro-orbital eye bleeding at specific intervals and test compound levels are analyzed by radioimmunoassay (RIA). Samples (80 μL) are first diluted to 0.5 mL with start buffer (8% methanol, 0.095% TFA in water) and applied to C18 columns previously conditioned with 1 mL methanol and equilibrated with 2 mL of start buffer. After washing with 1 mL start buffer, peptide is eluted with 0.8 mL of 80% methanol, 0.05% TFA and dried down in a centrifugal evaporator. Samples are reconstituted in 0.194 mL assay buffer (PBS buffer, pH 7.4, containing 10% fetal bovine serum). Standard dilutions of peptide are made in rat plasma. To perform RIA analysis, samples from dosed animal and standards are mixed with 5 μL diluted antibody (in RIA wash buffer: phosphate-buffered saline (PBS) containing 0.1% bovine serum albumin (BSA), 1:40,000 final dilution, 0.0022 μg), and incubated 1 to 4 h at 4° C. One tube contains the zero standard (B₀) and another no standard and no antibody (non-specific binding, NSB). Labeled tracer (0.018 μCi, diluted in RIA wash buffer) is then added and incubated at 4° C. for 12 to 18 h. The antibody bound fraction containing peptide is collected by magnetic separation using 10 μL of sheep anti-mouse IgG beads previously washed twice in 10 volumes RIA assay buffer. The beads are then washed twice with 1 mL of RIA wash buffer, collected by magnetic separation, resuspended in 0.1 mL of RIA wash buffer, and added to 2 mL scintillation fluid. Radioactivity is measured in a LS 6500 scintillation counter (Beckman-Coulter). The binding efficiency is defined as the percent radioactivity in the B₀ sample compared to the input counts. The percent bound in each sample is calculated by the equation:

% B/B₀=(sample cpm−NSB cpm)×100/(B₀ cpm−NSB cpm)

[0151] A standard curve is prepared by plotting % B/B₀ as a function of the log peptide concentration. A concentration vs. time plot is generated from the data in GraphPad Prism or Summit Software PK Solutions 2.0 to generate oral and i.v. PK curves. The area under the curve from T=0 to 4 hours (AUC_{0-4 h}) is calculated by the software for both p.o. and i.v. dosed animals. If the values are below the lower limit of detection (LOD) than the LOD is used to estimate the value (in this experiment 2 nM). Oral Bioavailabilty (F) is calculated using the equation:

F=(AUC_{p.o.,(0-4 h)}*D_{i.v.})/(AUC_{i.v.,(0-4 h)}*D_{p.o.})

where D_{i.v.} and D_{p.o.} equal the intravenous and oral dose, respectively.

### Example 6

### In Vitro Proteolytic Stability of Peptides

[0152] The stability of petides in the presence of several mammalian digestive enzymes can be determined. Peptides are exposed to a variety of in vitro conditions including digestive enzymes and low ph environments designed to simulate gastric fluid. Peptides are incubated with chymotrypsin, trypsin, pepsin, aminopeptidase, carboxypeptidase A, or simulated gastric fluid (sgf) at ph 1.0. Samples are collected at 0, 3, and 24 h for all conditions except pepsin digestion and the SGF. For the latter two conditions, samples are obtained at 0, 1, and 3 h. Negative control samples are prepared for initial and final time points. A separate, positive activity control is run in parallel to test peptide. All samples are analyzed by LC/MS

### Chymotrypsin

[0153] 500 μl samples of 0.01 mg/mL peptide and guanylin (Sigma-Aldrich, G116; positive control) are prepared in the chymotrypsin reaction buffer (100 mM Tris-HCl, 10 mM CaCl₂, pH 7.5) in 2 mL eppendorf tubes. Zero and 24 h control samples are prepared by adding 5 μL of a 10 mM chymostatin (Sigma-Alrich, C7268; a chymotrypsin inhibitor) stock for a final concentration of 100 μM. All samples are incubated at 37° C. for 5 min. 20 μL of a 0.01 mg/mL chymotrypsin stock (α-chympotrypsin from bovine pancreas; Sigma-Aldrich, C6423) are added to each sample for a 0.0004 mg/mL final concentration. Samples are returned to the 37° C. water bath. The reaction is quenched with 5 μL of a 10 mM chymostatin stock at each time point for a final concentration of 100 μM. No extra chymostatin is added to the control samples as they already had inhibitor. Samples are subsequently flash frozen in liquid nitrogen, and stored at −80° C. until analysis. Upon analysis, samples are thawed and transferred to a 1 mL 96-well plate. Standards of peptide and guanylin are prepared in chymotrypsin reaction buffer at 0.625, 1.25, 2.50, 5.00, and 10.00 μg/mL concentrations. These standards are used to generate a standard curve for quantification of samples. When necessary, the standard curves are also used to calculate the concentration of the corresponding digestion product. 10 μL injections are made of each sample and standard.

### Trypsin

[0154] 500 μL samples of 0.01 mg/mL peptide and BAEE (Nₐₗₚₕₐ Benzoyl-L-arginine ethyl ester hydrochloride; Signa-Aldrich, B4500; positive control) are prepared with trypsin reaction buffer (100 mM Tris-HCl, pH 7.5) in 2 mL eppendorf tubes. Zero and 24 h time point control samples are prepared (N=1) with 5 μL of a 100 mg/mL AEBSF (4-(2-Aminoethyl)benzenesulfonyl fluoride hydrochloride; a trypsin inhibitor) stock for a final concentration of 1 mg/mL. All control and test samples (0, 3, and 24 h) are incubated at 37° C. for 5 min. Twenty (20) μL of a 0.01 mg/mL trypsin (Sigma-Aldrich, T6467) stock are added to each sample for a final concentration of 0.0004 mg/mL. Samples are returned to the 37° C. water bath. The reaction is quenched with 5 μL of a 100 mg/mL AEBSF stock, which is added to each sample at the indicated timepoint, for a final concentration of 1 mg/mL. No extra AEBSF is added to the control samples as they already had inhibitor. Samples are subsequently flash frozen in liquid nitrogen, and stored at −80° C. until analysis. Upon analysis, samples are thawed and transferred to a 1 mL 96-well plate. Standards of peptide and BAEE are prepared in trypsin reaction buffer at 0.625, 1.25, 2.50, 5.00, and 10.00 μg/mL concentrations. These standards are used to generate a standard curve for quantification of samples. When necessary, the standard curves are also used to calculate the concentration of the corresponding digestion product. Ten (10) μL injections are made of each sample and standard.

### Pepsin

[0155] 500 μL samples of 100 U/mL pepsin (Pepsin porcine gastric mucosa; Sigma-Aldrich, P68871; U=release of 0.01 absorbance at 280 nM (A280) as TCA soluble hydrolysis products per min at 37° C. of hemoglobin) are prepared in the pepsin reaction buffer (100 mM HCl—KCl, pH 2.0) in 5 mL polystyrene round bottom tubes. To the control samples (0 and 24 h), 500 μL of a 1 M ammonium acetate (pepsin inhibitor) stock are added, for a final concentration of 0.5 M. All control and test samples (0, 1, and 3 h) are incubated at 37° C. for 5 min, while shaking. Fifty (50) μL of 0.1 mg/mL peptide and Insulin B chain, oxidized (Sigma-Aldrich, 16383; positive control), stocks are added to the respective tubes. Samples are returned to the 37° C. shaking water bath. Reactions are quenched by the addition of 500 μL of 1 M ammonium acetate for a final concentration of 0.5 M (except to the control samples, which already contained 0.5 M ammonium acetate). Samples are cooled on ice and stored at 4° C. until analysis. Upon analysis, samples are transferred to a 1 mL 96-well plate. Standards of peptide and Insulin B chain, oxidized, are prepared in 25 mM Tris-hydrochloric acid, 500 mM sodium chloride, pH 7.5 buffer at 0.625, 1.25, 2.50, 5.00, and 10.00 μg/mL concentrations. These standards are used to generate a standard curve for quantification of samples. Ten (10) μL injections are made of each sample and standard.

### Aminopeptidase

[0156] 500 μL samples of 0.01 mg/mL peptide and chemically synthesized wild type ST (positive control) are prepared in the aminopeptidase reaction buffer (5 mM Tris-HCl, 5 mM MgCl₂, pH 7.5) in 2 mL eppendorf tubes. 5 μL of a 5 mg/mL Bestatin hydrochloride (BioChemika, 08170; an aminopeptidase inhibitor) stock is added to each control sample (0 and 24 h), for a final concentration of 0.05 mg/mL. All control and test samples (0, 3, and 24 h) are incubated at 37° C. for 5 min. 0.02 U aminopeptidase (Aminopeptidase M, amino acid aryl amidase (Roche, 102768; U=hydrolysis of 1.0 umol of L-leucinamide to leucine and NH3 per min at pH 8.5 at 25° C.) are added to each sample. Samples are returned to the 37° C. water bath. The reaction is quenched with 5 μL of a 5 mg/mL Bestatin hydrochloride stock at the proper time point. No extra Bestatin hydrochloride is added to the control samples since they already had inhibitor present. Samples are subsequently flash frozen in liquid nitrogen, and stored at −80° C. until analysis. Upon analysis, samples are thawed and transferred to a 1 mL 96-well plate. Standards of peptide are prepared in aminopeptidase reaction buffer at 0.625, 1.25, 2.50, 5.00, and 10.00 μg/mL concentrations. These standards are used to generate a standard curve for quantification of samples. When necessary, the standard curves are also used to calculate the concentration of the corresponding digestion product. Ten (10) μL injections are made of each sample and standard.

### Carboxypeptidase A

[0157] 500 μL samples of 0.01 mg/mL peptide and N—CBZ-Glycine-Glycine-Leucine (Z-Gly-Gly-Leu; Sigma-Aldrich, C8501; positive control) are prepared in the carboxypeptidase A reaction buffer (25 mM Tris-HCl, 500 mM NaCl, pH 7.5) in 2 mL eppendorf tubes. Five (5) μL of a 40 μg/mL carboxypeptidase inhibitor (carboxypeptidase inhibitor from potato tuber (Signa-Aldrich, C0279) stock is added to each control sample (0 and 24 h), for a final concentration of 0.4 μg/mL. All control and test (0, 3 and 24 h) samples are incubated at 37° C. for 5 min. Twenty (20) μL of a 0.01 mg/mL carboxypeptidase A (Carboxypeptidase A from human pancreas; Sigma-Aldrich, C5358) stock is added to each sample. The samples are returned to the 37° C. water bath. The reaction is quenched with 5 μL of a 40 μg/mL carboxypeptidase inhibitor at the proper time point. No extra carboxypeptidase inhibitor is added to the control samples since there is already inhibitor present. Samples are subsequently flash frozen in liquid nitrogen, and stored at −80° C. until analysis. Upon analysis, samples are thawed and transferred to a 1 mL 96-well deep microtiter plate. Standards of peptide and Z-Gly-Gly-Leu are prepared in carboxypeptidase A reaction buffer at 0.625, 1.25, 2.50, 5.00, and 10.00 μg/mL concentrations. These standards are used to generate a standard curve for quantification of samples. When necessary, the standard curves are also used to calculate the concentration of the corresponding digestion product. Ten (10) μL injections are made of each sample and standard.

### Carboxypeptidase A—Identification of Proteolysis Product

[0158] To analyze carboxypeptidase A digestion product, samples of 0.01 mg/mL peptide are prepared in the carboxypeptidase A reaction buffer at a total volume of 500 μL in 2 mL eppendorf tubes. Triplicate samples are prepared for the following time points: 0, 15, 30, 60, 120, 180 and 240 min. The samples are incubated at 37° C. for 5 min. Twenty (20) μL of a 0.01 mg/mL carboxypeptidase A stock are added to each sample and returned to the 37° C. water bath. The reactions are quenched with 5 μL of a 40 μg/mL carboxypeptidase inhibitor at the proper time points. Samples are subsequently flash frozen in liquid nitrogen, and stored at −80° C. until analysis. Upon analysis, samples are thawed and transferred to a 1 mL 96-well plate. Standards of peptide prepared in carboxypeptidase A reaction buffer at 0.625, 1.25, 2.50, 5.00, and 10.00 μg/mL concentrations. These standards are used to generate a standard curve for quantification of samples. When necessary, the standard curves are also used to calculate the concentration of the corresponding digestion product. Ten (10) μL injections are made of each sample and standard. If the formation of a digestion product is evident, then a spectral analysis used to determine the mass of the digestion product, and predict its possible identity.

### Simulated Gastric Fluid (SGF)

[0159] Samples of peptide are prepared in the simulated gastric fluid buffer (0.2% NaCl (w/v), 0.7% HCl (v/v), pH 1) to a total volume of 500 μL in 2 mL eppendorf tubes. The reference control and test samples (0, 1 and 3 h) are incubated at 37° C. for the time point indicated. The reference control sample is diluted 10-fold (1000 μL volume) in distilled water for a final concentration of 10 μM and chilled on ice. At each time point, samples are diluted 10-fold (1000 μL volume) in distilled water for an expected concentration of 10 μM, and chilled on ice, until analysis. Upon analysis, samples are transferred to a 1 mL 96-well plate. Standards of peptide are prepared in distilled water at 0.625, 1.25, 2.50, 5.00, and 10.00 μM concentrations. These standards are used to generate a standard curve for quantification of samples. Ten (10) μL injections are made of each sample and standard.

### Example 7

### Rodent Intestinal Transit Assays

[0160] In order to determine whether a peptide increases the rate of gastrointestinal transit, the peptide and controls are tested using a murine gastrointestinal transit (GIT) assay (Moon et al. Infection and Immunity 25:127, 1979). In this assay, charcoal, which can be readily visualized in the gastrointestinal tract, is administered to mice after the administration of a test compound. The distance traveled by the charcoal is measured and expressed as a percentage of the total length of the colon.

[0161] Mice are fasted with free access to water for 12 to 16 hours before the treatment with peptide or control buffer. The peptides are orally administered at 1 μg/kg-1 mg/kg of peptide in buffer (20 mM Tris pH 7.5) 7 minutes before being given an oral dose of 5% Activated Carbon (Aldrich 242276-250G). Control mice are administered buffer only before being given a dose of Activated Carbon. After 15 minutes, the mice are sacrificed and their intestines from the stomach to the cecum are dissected. The total length of the intestine as well as the distance traveled from the stomach to the charcoal front is measured for each animal and the results are expressed as the percent of the total length of the intestine traveled by the charcoal front. All results are reported as the average of 10 mice±standard deviation. A comparison of the distance traveled by the charcoal between the mice treated with peptide versus the mice treated with vehicle alone is performed using a Student's t test and a statistically significant difference is considered for P<0.05. P-values are calculated using a two-sided T-Test assuming unequal variances. Controls include vehicle alone (e.g. Tris buffer) and Zelnorm®.

[0162] An identical experiment can be performed to determine if peptides are effective in a chronic dosing treatment regimen. Briefly, 8 week old CD1 female mice are dosed orally once a day for 5 days with either peptide (0.06 mg/kg or 0.25 mg/kg in 20 mM Tris pH 7.5) or vehicle alone (20 mM Tris pH 7.5). On the 5^{th} day, a GIT assay is performed identical to that, above except 200 μl of a 10% charcoal solution is administered.

[0163] The gastrointestinal transit assay can also performed in male and female CD rats (Charles River; Wilmington, Mass.). The assay is performed as described above for mice except an average of 5-8 animals are used for each test group and test peptide and 5% activated carbon are administered simultaneously (versus 7 minutes apart). In addition, the animals are sacrificed 10 minutes after the administration of peptide and test compound. The experiment can be performed in male and female rats.

[0164] The gastrointestinal transit assay can also performed in wild-type mice and mice lacking the guanylatc cyclase C receptor (GC-C KO; Mann et al 1997 Biochem and Biophysical Research Communications 239:463). Wild type and GC-C KO mice are fasted overnight and test peptide or vehicle alone are orally administered 10 minutes prior to an oral dose of a 10% Activated Carbon/10% Gum Arabic suspension. Animals are sacrificed 5 minutes after peptide or vehicle administration. is is

### Example 8

### Intestinal Secretion Assay in Suckling Mice (SuMi Assay)

[0165] Peptides are tested for their ability to increase intestinal secretion using a suckling mouse model of intestinal secretion. In this model a test compound is administered to suckling mice that are between 7 and 9 days old. After the mice are sacrificed, the gastrointestinal tract from the stomach to the cecum is dissected (“guts”). The remains (“carcass”) as well as the guts are weighed and the ratio of guts to carcass weight is calculated. If the ratio is above 0.09, one can conclude that the test compound increases intestinal secretion. Wild type ST peptide can be used as a control in this assay.

### Example 9

### Colonic Hyperalgesia Animal Models

[0166] Hypersensitivity to colorectal distension is common in patients with IBS and may be responsible for the major symptom of pain. Both inflammatory and non-inflammatory animal models of visceral hyperalgesia to distension have been developed to investigate the effect of compounds on visceral pain in IBS.

[0167] I. Trinitrobenzenesulphonic Acid (TNBS)—Induced Rectal Allodynia in Two Rodent Models

[0168] TNBS Visceral Hypersensitivity Rat Model

[0169] Male Wistar rats (220-250 g) are premedicated with 0.5 mg/kg of acepromazine injected intraperitoneally (IP) and anesthetized by intramuscular administration of 100 mg/kg of ketamine. Pairs of nichrome wire electrodes (60 cm in length and 80 μm in diameter) are implanted in the striated muscle of the abdomen, 2 cm laterally from the white line. The free ends of electrodes are exteriorized on the back of the neck and protected by a plastic tube attached to the skin. Electromyographic (EMG) recordings are started 5 days after surgery. Electrical activity of abdominal striated muscle is recorded with an electroencephalograph machine (Mini VIII, Alvar, Paris, France) using a short time constant (0.03 sec.) to remove low-frequency signals (<3 Hz).

[0170] Ten days post surgical implantation, trinitrobenzenesulphonic acid (TNBS) is administered to induce rectal inflammation. TNBS (80 mg kg⁻¹ in 0.3 ml 50% ethanol) is administered intrarectally through a silicone rubber catheter introduced at 3 cm from the anus under light diethyl-ether anesthesia, as previously described (Morteau et al. 1994 Dig Dis Sci 39:1239). Following TNBS administration, rats are placed in plastic tunnels where they are severely limited in mobility for several days before colorectal distension (CRD). Experimental compound is administered one hour before CRD which is performed by insertion into the rectum, at 1 cm of the anus, a 4 cm long balloon made from a latex condom (Gue et al, 1997 Neurogastroenterol. Motil. 9:271). The balloon is fixed on a rigid catheter taken from an embolectomy probe (Fogarty). The catheter attached balloon is fixed at the base of the tail. The balloon, connected to a barostat, is inflated progressively by steps of 15 mmHg, from 0 to 60 mmHg, each step of inflation lasting 5 min. Evaluation of rectal sensitivity, as measured by EMG, is performed before (1-2 days) and 3 days following rectal instillation of TNBS.

[0171] The number of spike bursts that corresponds to abdominal contractions is determined per 5 min periods. Statistical analysis of the number of abdominal contractions and evaluation of the dose-effects relationships is performed by a one way analysis of variance (ANOVA) followed by a post-hoc (Student or Dunnett tests) and regression analysis for ED50 if appropriate.

[0172] TNBS Visceral Hypersensitivity Model in Wild-Type (Wt) Mice and Mice Lacking the Guanylate-Cyclase C Receptor (GC-C KO)

[0173] TNBS induced visceral hypersensitivity can be assessed in WT and GC-C KO mice. Two groups (WT and GC-C KO) of male mice (22-25 g) are surgically prepared for electromyographic (EMG) recordings. Three electrodes are implanted in the striated muscles of the abdomen for EMG recording of abdominal contractions. Colorectal distension (CRD) is performed with a balloon inflated by 10 s steps of 0.02 ml from 0 to 0.12 ml. Under basal conditions mice are submitted to control CRD (time 0) followed by oral administration of test peptide (0.01 and 0.3 μg/kg) or vehicle only (distilled water, 1 ml) at 3 hours. One hour post dosing the CRD procedure is repeated. Abdominal EMG contractile response to colorectal distension in basal conditions in both WT and GC-C KO mice (12-14 mice per group) is determined in the absence of vehicle and test peptide, and the mean+/−standard error of the mean (SEM) are determined.

[0174] For TNBS induced visceral hypersensitivity conditions, mice are submitted to control CRD (time 0) and TNBS (20 mg/kg) is administered at 3 days. Three days post intracolonic TNBS-induction animals are orally administered test peptide (0.01 and 0.3 μg/kg) or vehicle (distilled water, 1 ml) 1 hour before CRD. The effect of test peptide (0.01 μg/kg) on abdominal response to colorectal distension after TNBS in WT and GC-C KO mice (12-14 per group) at a volume distension of 0.8 ml is determined and the mean+/−standard error of the mean (SEM) is determined.

[0175] II. Partial Restraint Stress-Induced Hyperalgesia Model

[0176] Five groups of female Wistar rats (weighing 200-250 g each), are surgically prepared for electromyography as described (Morteau et al. 1994 Dig Dis Sci 39:1239-48) and can be used to evaluate the effects of a test peptide on colorectal sensitivity and compliance after a 2 hour partial restraint stress session. Partial restraint stress (PRS), a relatively mild stress, is induced as previously described (Morteau et al. 1994 Dig Dis Sci 39:1239-48). Female rats are lightly anesthetized with diethyl ether and their shoulders, upper forelimbs and thoracic trunk are wrapped in a confining harness of paper tape to restrict, but not prevent body movements. Control sham-stress animals are anesthitized but not wrapped. Animals receive isobaric colorectal distensions (CRD) directly prior to (control CRD) and 15 minutes after two hours of partial restraint induced stress. Rats are treated orally with test peptide (0.3, 3, 30 ug/kg) or vehicle only (distilled water 1 mL) one hour before the CRD procedure. For the CRD procedure, rats are acclimatized to restraint in polypropylene tunnels (diameter: 7 cm; length: 20 cm) periodically for several days before CRD in order to minimize recording artifacts. The balloon used for distension is 4 cm long and made from a latex condom. It is fixed on a rigid catheter taken from an embolectomy probe (Fogarty). CRD is performed by insertion of the balloon in the rectum at 1 cm from the anus. The tube is fixed at the base of the tail. Isobaric distensions are performed from 0 to 60 mmHg, with each distension step lasting 5 minutes. The first distension is performed at a pressure of 15 mmHg and an increment of 15 mmHg is added at each following step, until a maximal pressure of 60 mmHg is attained. Electromyographic recordings commence 5 days after surgery. Electrical activity is recorded with an electroencephalograph (Mini VIII, Alvar, Paris, France) using a short time constant (0.03 sec.) to remove low-frequency signals (<3 Hz) and a paper speed of 3.6 cm/minute. Isobaric distensions of the colon are performed by connecting the balloon to a computerized barostat. Colonic pressure and balloon volume are continuously monitored on a potentiometric recorder (L6514, Linseis, Selb, Germany) with a paper speed of 1.0 cm/minute. The number of spike bursts, corresponding to abdominal contractions, is evaluated per 5-minute period. Colorectal volumes are determined as the maximal volume obtained for each stage of distension using the potentiometric recorder. Statistical analysis of these two parameters is performed using a one way analysis of variance (ANOVA) followed by an unpaired two-tailed Student's t test using GraphPad Prism 4.0. p values<0.05 are considered significantly different. The values are expressed as mean±SEM.

[0177] III. Water Avoidance Stress-Induced Hyperalgesia Model

[0178] The effect of peptides on basal visceral nociception can be tested using a model of water avoidance stress-induced visceral hyperalgesia in adult male Wistar rats. The stress involves confining rats, to a platform surrounded by water for a period of 1 hour and then measuring their visceromotor response to colonic distension using electromyography (EMG).

[0179] At least 7 days prior to stress measurements, animals are deeply anesthetized with pentobarbital sodium (45 mg/kg) and equipped with electrodes implanted into the external oblique musculature, just superior to the inguinal ligament. Electrode leads are then tunneled subcutaneously and externalized laterally for future access. Following surgery, rats are housed in pairs and allowed to recover for at least 7 days. On the day of the experiment, animals are lightly anesthetized with halothane, and a lubricated latex balloon (6 cm) is inserted intra-anally into the descending colon. Animals are allowed to recover for 30 minutes, and colorectal distension (CRD) is initiated. The CRD procedure consists of graded intensities of phasic CRD (10, 20, 40, 60 mmHg; 20 s duration; 4 min inter-stimulus interval). Visceromotor response (VMR) to CRD is quantified by measuring EMG activity.

[0180] To determine the effect of a test peptide in a model of water avoidance stress-induced visceral hyperalgesia, a baseline CRD is recorded and then the animals are subjected to 1 hour of water avoidance stress. For water avoidance stress, the test apparatus consists of a Plexiglas tank with a block affixed to the center of the floor. The tank is filled with fresh room temperature water (25° C.) to within 1 cm of the top of the block. The animals are placed on the block for a period of 1 h. The sham water avoidance stress entails placing the rats on the same platform in a waterless container.

### Phenylbenzoquinone-Induced Writhing Model

[0181] The PBQ-induced writhing model can be used to assess pain control activity of the peptides and GC-C receptor agonists. This model is described by Siegmund et al. (1957 Proc. Soc. Exp. Bio. Med. 95:729-731). Briefly, one hour after oral dosing with a test compound, e.g., a peptide, morphine or vehicle, 0.02% phenylbenzoquinone (PBQ) solution (12.5 mL/kg) is injected by intraperitoneal route into the mouse. The number of stretches and writhings are recorded from the 5^{th} to the 10^{th} minute after PBQ injection, and can also be counted between the 35^{th} and 40^{th} minute and between the 60^{th} and 65^{th} minute to provide a kinetic assessment. The results are expressed as the number of stretches and writhings (mean±SEM) and the percentage of variation of the nociceptive threshold calculated from the mean value of the vehicle-treated group. The statistical significance of any differences between the treated groups and the control group is determined by a Dunnett's test using the residual variance after a one-way analysis of variance (P<0.05) using SigmaStat Software.

### Example 10

### Measuring the Effect of Peptides on Bowel Habits

[0182] Single doses of 30, 100, 300, 1000 or 3000 μg of peptide are given to healthy males and postmenopausal females. At each dose level (peptide or placebo (vehicle) is administered orally in 5.0 mL 50 mM phosphate buffer (pH 6.0) plus 3×20 mL water rinses and 175 mL water after at least a 10-hour fast. In each dosing group, subjects are randomized to receive either placebo or peptide. Bowel habits (including Bristol Stool Form Scale score (BSFS), stool frequency, and stool weight) are evaluated for each collected bowel movement 48 hours prior to dose and up to approximately 48 hours postdose. The BSFS scale is as follows: (1) Separate hard lumps, like nuts; (2) Sausage-shaped but lumpy, (3) Like a sausage or snake but with cracks on its surface, (4) Like a sausage or snake, smooth and soft, (5) Soft blobs with clear-cut edges, (6) Fluffy pieces with ragged edges, a mushy stool, and (7) Watery, no solid pieces.

### Example 11

### Examination of the Effect of Peptides on the Consistency and Timing of Bowel Movements in Humans after a Seven-Day Dosing Period

[0183] Seven daily doses of 30, 100, 300, or 1000 μg of peptide are given to healthy subjects. Peptide or placebo (vehicle) is administered orally in 5.0 mL 50 mM phosphate buffer (pH 6.0) plus 3×20 mL water rinses and 175 mL water after at least a 10-hour fast. In each dosing group, subjects are randomized to receive peptide or receive placebo. Daily mean BSFS scores, mean stool weight and mean case of passage for the different dosing groups during the seven days prior to and the seven days during dosing with peptide are collected. The Mean Ease of Passage Scale is as follows: (1) Manual disimpaction, (2) Enema needed, (3) Straining needed, (4) Normal, (5) Urgent without pain, (6) Urgent with pain, and (7) Incontinent.

### Example 12

### Peptide Effects in a Rat Model of Postoperative Ileus

[0184] Female CD rats are used to test the effect of peptide on delayed transit induced by abdominal surgery and manual manipulation of the small intestine. Groups of at least nine rats undergo abdominal surgery under isoflurane anesthesia. Surgery consists of laparotomy and 5 minutes of gentle manual intestinal massage. Following recovery from anesthesia, rats are dosed orally with either 10 μg/kg peptide 3 or vehicle (20 mM Tris) in a volume of 300 μl hour after dosing, intestinal transit rate is measured. Animals are again dosed with 300 μl of the peptide followed immediately by 500 μl of a charcoal meal (10% charcoal, 10% gum arabic in water). To calculate the distance of the small intestine traveled by the charcoal front, after 20 minutes, the total length of the intestine as well as the distance traveled from the stomach to the charcoal front are measured for each animal.

### Example 13

### Peptide Effect on cGMP Levels and Secretion in Ligated Loops Rodent Models

[0185] The effect of peptide on cGMP levels and secretion are studied by injecting peptide directly into an isolated loop in either wild-type or GC-C KO mice. This done by surgically ligating a loop in the small intestine of the mouse. The methodology for ligated loop formation is a similar to that described in London et al. 1997 Am J Physiol p. G93-105. The loop is roughly centered and is a length of 1-3 cm. The loops are injected with 100 μl of either peptide (5 μg) or vehicle (20 mM Tris, pH 7.5 or Krebs Ringer, 10 mM Glucose, HEPES buffer (KRGH)). Following a recovery time of 90 minutes the loops are excised. Weights are recorded for each loop before and after removal of the fluid contained therein. The length of each loop is also recorded. A weight to length ratio (W/L) for each loop is calculated to determine the effects of peptide on secretion.

[0186] To determine the effect of peptide on cGMP activity, fluid from the loop is collected in ice-cold trichloracetic acid (TCA) and stored at −80° C. for use in an assay to measure cGMP levels in the fluid. Intestinal fluid samples are TCA extracted, and cyclic GMP is measured by EIA according to procedures outlined in the Cayman Chemical Cyclic GMP EIA kit (Cayman Chemical, Ann Arbor, Mich.) to determine cyclic GMP levels in the intestinal fluid of the mouse in the presence of either peptide or vehicle. The effects of peptide on cGMP levels and secretion in ligated loops in female CD rats can also be determined using protocols similar to those described above. In the case of the rat, however four loops of intestine are surgically ligated. The first three loops are distributed equally in the small intestine and the fourth loop is located in colon. Loops are 1 to 3 centimeters, and are injected with 200 μL of either peptide (5 μg) or vehicle (Krebs Ringer, 10 mM glucose, HEPES buffer (KRGH)).

### Example 14

### Peptide Effects on Opioid Induced Constipation

[0187] The effect of peptide on opioid induced constipation is studied by dosing female rats (˜160 g each) with 300 μl of the opiate, morphine (2.5 mg/kg) via intra-peritoneal injection. Thirty minutes post dosing, animals are treated with 300 μl of SEQ ID NO:3 or vehicle only. Ten minutes later, the animals are orally dosed with 500 μl 10% charcoal, 10% gum arabic meal. After ten minutes, the animals are sacrificed and gastrointestinal transit is measured as in Example 3 above.

### Example 15

### Mass Spectrometry Characterization of Disulfide Bonds in Peptide

[0188] The position of disulfide bonds in a test peptide can be determined as follows. To identify the optimal conditions required to partially reduce a test peptide, chemically synthesized peptide is alkylated with iodoacetamide after TCEP (tris(2-carboxyethyl) phosphine) treatment (0.1 to 10 mM for 20 minutes at room temperature). After TCEP reduction, the reaction is adjusted to pH 8.0 with Tris and iodoacetamide is added to 50 mM. The reaction products are analyzed by LC-MS. Partially reduced peptide is then cyanylated, cleaved with base and completely reduced to separate fragments. After partial reduction, both cyanylation and cleavage of peptide are performed either in a test tube or in an HPLC column. A modified method of Wu and Watson ((2002) Methods Mol. Biol. 194: 1-22) is used to determine the position of the disulfide bonds. The steps are carried out manually, with isolation of the alkylation products by solid phase extraction (SPE), or in-line (automated), with reactions occurring in an SPE column. Briefly, the manual procedure comprised the following. Chemically synthesized peptide is partially reduced with 1 mM tris(2-carboxyethyl) phosphine (TCEP) at pH 3. The sulfhydryl groups of partially reduced peptide are cyanylated with 2.1 μmoles of 1-cyano-4-dimethylamino-pyridinium tetrafluoroborate (CDAP) for 15 minutes. The reaction mixture is then diluted to 0.5 mL with 10 mM ammonium acetate pH 5.8 and applied to an Amprep octadecyl C18 minicolumn (100 mg, GE HealthTech). The minicolumn is washed with 1 mL of 10 mM ammonium acetate pH 5.8 and peptides eluted with 0.6 mL methanol. After drying, the peptides are cleaved in 1 M NH4OH and fully reduced with 0.1 M TCEP. After drying, the peptide fragments are reconstituted in 0.1% formic acid and analyzed by LC-MS. Briefly, the automated procedure comprised the following. Peptide is loaded onto an Oasis HLB 2×15 mm column (Waters). Reactions are carried out by filling a 5 mL sample loop with 1.2 mM TCEP, 2.4 mM CDAP, 2 M NH₄OH or 6 mM TCEP and pushing each reagent through the column with 0.1% formic acid in 5% methanol at a flow rate of 0.3 mL/min. The column is then back-flushed and the cleaved peptides analyzed by LC-MS.

[0189] LC-MS analysis can be conduced using an Atlantis dC18 2.1×50 mm column (Waters) equilibrated in 98% buffer A (0.1% formic acid), 2% buffer B (0.1% formic acid: 85% methanol, 15% CH3CN) at a flow rate of 0.3 mL/min. After a 4 min wash with the same buffers, peptides are eluted with a linear gradient of 2% buffer B to 40% buffer B over 38 min with a constant flow rate of 0.3 mL/min. Cleaved peptide masses are determined using a Micromass Q-T of II instrument equipped with an electrospray ionization (ESI) source operating in positive ion mode. The instrument is programmed to scan in the mass range of m/z 100 to 1000. Molecular weight predictions and data analysis are carried out with MassLynx version 4.0 software. Based on the method of Wu and Watson (supra), a list of possible fragments resulting from CN-induced cleavage of singly reduced and cyanylated species of peptide with all possible disulfide linkage combinations is generated. The list included the signature fragments for each possible structure and is used to predict the disulfide bonding pattern of the test peptide.

### PEGylated Peptides

[0190] The in vivo half-life of peptides can be extended by conjugating the peptide to a water soluble polymer, such as polyethylene glycol (PEG) to create a PEGylated peptide. The polyethylene glycol molecules are usually connected to the peptide via a reactive group found on the peptide, e.g., an amino group found within a lysine or at the amino terminus of the peptide.

[0191] Various methods are known for attaching polyethylene glycol to a peptide (see, for example, U.S. Pat. No. 4,002,531; U.S. Pat. No. 4,904,584; U.S. Pat. No. 5,834,594; U.S. Pat. No. 5,824,784 and U.S. Pat. No. 5,985,265).

### Administration of Peptides and GC-C Receptor Agonists

[0192] For therapeutic and preventive treatment of disorders described herein, the peptides and agonists described herein can be administered orally, e.g., as a tablet or cachet containing a predetermined amount of the active ingredient, pellet, gel, paste, syrup, bolus, electuary, slurry, sachet; capsule; powder; lyophilized powder; granules; as a solution or a suspension in an aqueous liquid or a non-aqueous liquid; as an oil-in-water liquid emulsion or a water-in-oil liquid emulsion, via a liposomal formulation (see, e.g., EP 736299) or in some other form. Orally administered compositions can include binders, lubricants, inert diluents, lubricating, surface active or dispersing agents, flavoring agents, and humectants. Orally administered formulations such as tablets may optionally be coated or scored and may be formulated so as to provide sustained, delayed or controlled release of the active ingredient therein. The peptides and agonists can be co-administered with other agents used to treat gastrointestinal disorders including but not limited to the agents described herein. The peptides and agonists can also be administered by rectal suppository. For the treatment of disorders outside the gastrointestinal tract such as congestive heart failure and benign prostatic hypertrophy, peptides and agonists are preferably administered parenterally or orally.

[0193] The peptides described herein can be administered alone or in combination with other agents. For example, the peptides can be administered together with an analgesic peptide or compound. The analgesic peptide or compound can be covalently attached to a peptide described herein or it can be a separate agent that is administered together with or sequentially with a peptide described herein in a combination therapy.

[0194] Combination therapy can be achieved by administering two or more agents, e.g., a peptide described herein and an analgesic peptide or compound, each of which is formulated and administered separately, or by administering two or more agents in a single formulation. Other combinations are also encompassed by combination therapy. For example, two agents can be formulated together and administered in conjunction with a separate formulation containing a third agent. While the two or more agents in the combination therapy can be administered simultaneously, they need not be. For example, administration of a first agent (or combination of agents) can precede administration of a second agent (or combination of agents) by minutes, hours, days, or weeks. Thus, the two or more agents can be administered within minutes of each other or within 1, 2, 3, 6, 9, 12, 15, 18, or 24 hours of each other or within 1, 2, 3, 4, 5, 6, 7, 8, 9, 10, 12, 14 days of each other or within 2, 3, 4, 5, 6, 7, 8, 9, or 10 weeks of each other. In some cases even longer intervals are possible. While in many cases it is desirable that the two or more agents used in a combination therapy be present in within the patient's body at the same time, this need not be so.

[0195] Combination therapy can also include two or more administrations of one or more of the agents used in the combination. For example, if agent X and agent Y are used in a combination, one could administer them sequentially in any combination one or more times, e.g., in the order X-Y-X, X-X-Y, Y-X-Y, Y-Y-X, X-X-Y-Y, etc.

[0196] Combination therapy can also include the administration of two or more agents via different routes or locations. For example, (a) one agent is administered orally and another agent is administered intravenously or (b) one agent is administered orally and another is administered locally. In each case, the agents can either simultaneously or sequentially. Approximated dosages for some of the combination therapy agents described herein are found in the “BNF Recommended Dose” column of tables on pages 11-17 of WO01/76632 (the data in the tables being attributed to the March 2000 British National Formulary) and can also be found in other standard formularies and other drug prescribing directories. For some drugs, the customary prescribed dose for an indication will vary somewhat from country to country.

[0197] The agents, alone or in combination, can be combined with any pharmaceutically acceptable carrier or medium. Thus, they can be combined with materials that do not produce an adverse, allergic or otherwise unwanted reaction when administered to a patient. The carriers or mediums used can include solvents, dispersants, coatings, absorption promoting agents, controlled release agents, and one or more inert excipients (which include starches, polyols, granulating agents, microcrystalline cellulose (e.g. celphere, Celphere beads®), diluents, lubricants, binders, disintegrating agents, and the like), etc. If desired, tablet dosages of the disclosed compositions may be coated by standard aqueous or nonaqueous techniques.

[0198] Compositions of the present disclosure may also optionally include other therapeutic ingredients, anti-caking agents, preservatives, sweetening agents, colorants, flavors, desiccants, plasticizers, dyes, glidants, anti-adherents, anti-static agents, surfactants (wetting agents), anti-oxidants, film-coating agents, and the like. Any such optional ingredient must, be compatible with the compound described herein to insure the stability of the formulation.

[0199] The composition may contain other additives as needed, including for example lactose, glucose, fructose, galactose, trehalose, sucrose, maltose, raffinose, maltitol, melezitose, stachyose, lactitol, palatinite, starch, xylitol, mannitol, myoinositol, and the like, and hydrates thereof, and amino acids, for example alanine, glycine and betaine, and peptides and proteins, for example albumen.

[0200] Examples of excipients for use as the pharmaceutically acceptable carriers and the pharmaceutically acceptable inert carriers and the aforementioned additional ingredients include, but are not limited to binders, fillers, disintegants, lubricants, anti-microbial agents, and coating agents such as:

BINDERS: corn starch, potato starch, other starches, gelatin, natural and synthetic gums such as acacia, xanthan, sodium alginate, alginic acid, other alginates, powdered tragacanth, guar gum, cellulose and its derivatives (e.g., ethyl cellulose, cellulose acetate, carboxymethyl cellulose calcium, sodium carboxymethyl cellulose), polyvinyl pyrrolidone (e.g., povidone, crospovidone, copovidone, etc), methyl cellulose, Methocel, pre-gelatinized starch (e.g., STARCH 1500® and STARCH 1500 LM®, sold by Colorcon, Ltd.), hydroxypropyl methyl cellulose, microcrystalline cellulose (e.g. AVICEL™, such as, AVICEL-PH-101™-103™ and -105™, sold by FMC Corporation, Marcus Hook, Pa., USA), or mixtures thereof,
FILLERS: talc, calcium carbonate (e.g., granules or powder), dibasic calcium phosphate, tribasic calcium phosphate, calcium sulfate (e.g., granules or powder), microcrystalline cellulose, powdered cellulose, dextrates, kaolin, mannitol, silicic acid, sorbitol, starch, pre-gelatinized starch, dextrose, fructose, honey, lactose anhydrate, lactose monohydrate, lactose and aspartame, lactose and cellulose, lactose and microcrystalline cellulose, maltodextrin, maltose, mannitol, microcrystalline cellulose & guar gum, molasses, sucrose, or mixtures thereof,
DISINTEGRANTS: agar-agar, alginic acid, calcium carbonate, microcrystalline cellulose, croscarmellose sodium, crospovidone, polacrilin potassium, sodium starch glycolate, potato or tapioca starch, other starches, pre-gelatinized starch, clays, other algins, other celluloses, gums (like gellan), low-substituted hydroxypropyl cellulose, or mixtures thereof,
LUBRICANTS: calcium stearate, magnesium stearate, mineral oil, light mineral oil, glycerin, sorbitol, mannitol, polyethylene glycol, other glycols, stearic acid, sodium lauryl sulfate, sodium stearyl fumarate, vegetable based fatty acids lubricant, talc, hydrogenated vegetable oil (e.g., peanut oil, cottonseed oil, sunflower oil, sesame oil, olive oil, corn oil and soybean oil), zinc stearate, ethyl oleate, ethyl laurate, agar, syloid silica gel (AEROSIL 200, W.R. Grace Co., Baltimore, Md. USA), a coagulated aerosol of synthetic silica (Deaussa Co., Plano, Tex. USA), a pyrogenic silicon dioxide (CAB-O-SIL, Cabot Co., Boston, Mass. USA), or mixtures thereof,
ANTI-CAKING AGENTS: calcium silicate, magnesium silicate, silicon dioxide, colloidal silicon dioxide, talc, or mixtures thereof,
ANTIMICROBIAL AGENTS: benzalkonium chloride, benzethonium chloride, benzoic acid, benzyl alcohol, butyl paraben, cetylpyridinium chloride, cresol, chlorobutanol, dehydroacetic acid, ethylparaben, methylparaben, phenol, phenylethyl alcohol, phenoxyethanol, phenylmercuric acetate, phenylmercuric nitrate, potassium sorbate, propylparaben, sodium benzoate, sodium dehydroacetate, sodium propionate, sorbic acid, thimersol, thymo, or mixtures thereof, and
COATING AGENTS: sodium carboxymethyl cellulose, cellulose acetate phthalate, ethylcellulose, gelatin, pharmaceutical glaze, hydroxypropyl cellulose, hydroxypropyl methylcellulose (hypromellose), hydroxypropyl methyl cellulose phthalate, methylcellulose, polyethylene glycol, polyvinyl acetate phthalate, shellac, sucrose, titanium dioxide, carnauba wax, microcrystalline wax, gellan gum, maltodextrin, methacrylates, microcrystalline cellulose and carrageenan or mixtures thereof.

[0201] The formulation can also include other excipients and categories thereof including but not limited to L-histidine, Pluronic®, Poloxamers (such as Lutrol® and Poloxamer 188), ascorbic acid, glutathione, permeability enhancers (e.g. lipids, sodium cholate, acylcarnitine, salicylates, mixed bile salts, fatty acid micelles, chelators, fatty acid, surfactants, medium chain glycerides), protease inhibitors (e.g. soybean trypsin inhibitor, organic acids), pH lowering agents and absorption enhancers effective to promote bioavailability (including but not limited to those described in U.S. Pat. No. 6,086,918 and U.S. Pat. No. 5,912,014), creams and lotions (like maltodextrin and carrageenans); materials for chewable tablets (like dextrose, fructose, lactose monohydrate, lactose and aspartame, lactose and cellulose, maltodextrin, maltose, mannitol, microcrystalline cellulose and guar gum, sorbitol crystalline); parenterals (like mannitol and povidone); plasticizers (like dibutyl sebacate, plasticizers for coatings, polyvinylacetate phthalate); powder lubricants (like glyceryl behenate); soft gelatin capsules (like sorbitol special solution); spheres for coating (like sugar spheres); spheronization agents (like glyceryl behenate and microcrystalline cellulose); suspending/gelling agents (like carrageenan, gellan gum, mannitol, microcrystalline cellulose, povidone, sodium starch glycolate, xanthan gum); sweeteners (like aspartame, aspartame and lactose, dextrose, fructose, honey, maltodextrin, maltose, mannitol, molasses, sorbitol crystalline, sorbitol special solution, sucrose); wet granulation agents (like calcium carbonate, lactose anhydrous, lactose monohydrate, maltodextrin, mannitol, microcrystalline cellulose, povidone, starch), caramel, carboxymethylcellulose sodium, cherry cream flavor and cherry flavor, citric acid anhydrous, citric acid, confectioner's sugar, D&C Red No. 33, D&C Yellow #10 Aluminum Lake, disodium edetate, ethyl alcohol 15%, FD& C Yellow No. 6 aluminum lake, FD&C Blue #1 Aluminum Lake, FD&C Blue No. 1, FD&C blue no. 2 aluminum lake, FD&C Green No. 3, FD&C Red No. 40, FD&C Yellow No. 6 Aluminum Lake, FD&C Yellow No. 6, FD&C Yellow No. 10, glycerol palmitostearate, glyceryl monostearate, indigo carmine, lecithin, manitol, methyl and propyl parabens, mono ammonium glycyrrhizinate, natural and artificial orange flavor, pharmaceutical glaze, poloxamer 188, Polydextrose, polysorbate 20, polysorbate 80, polyvidone, pregelatinized corn starch, pregelatinized starch, red iron oxide, saccharin sodium, sodium carboxymethyl ether, sodium chloride, sodium citrate, sodium phosphate, strawberry flavor, synthetic black iron oxide, synthetic red iron oxide, titanium dioxide, and white wax.

[0202] Solid oral dosage forms may optionally be treated with coating systems (e.g. Opadry® fx film coating system, for example Opadry® blue (OY-LS-20921), Opadry® white (YS-2-7063), Opadry® white (YS-1-7040), and black ink (S-1-8106).

[0203] The agents either in their free form or as a salt can be combined with a polymer such as polylactic-glycoloic acid (PLGA), poly-(I)-lactic-glycolic-tartaric acid (P(I)LGT) (WO 01/12233), polyglycolic acid (U.S. Pat. No. 3,773,919), polylactic acid (U.S. Pat. No. 4,767,628), poly(E-caprolactone) and poly(alkylene oxide) (U.S. 20030068384) to create a sustained release formulation. Such formulations can be used to implants that release a peptide or another agent over a period of a few days, a few weeks or several months depending on the polymer, the particle size of the polymer, and the size of the implant (see, e.g., U.S. Pat. No. 6,620,422). Other sustained release formulations and polymers for use in are described in EP 0 467 389 A2, WO 93/24150, U.S. Pat. No. 5,612,052, WO 97/40085, WO 03/075887, WO 01/01964A2, U.S. Pat. No. 5,922,356, WO 94/155587, WO 02/074247A2, WO 98/25642, U.S. Pat. No. 5,968,895, U.S. Pat. No. 6,180,608, U.S. 20030171296, U.S. 20020176841, U.S. Pat. No. 5,672,659, U.S. Pat. No. 5,893,985, U.S. Pat. No. 5,134,122, U.S. Pat. No. 5,192,741, U.S. Pat. No. 5,192,741, U.S. Pat. No. 4,668,506, U.S. Pat. No. 4,713,244, U.S. Pat. No. 5,445,832 U.S. Pat. No. 4,931,279, U.S. Pat. No. 5,980,945, WO 02/058672, WO 9726015, WO 97/04744, and. US20020019446. In such sustained release formulations microparticles (Delie and Blanco-Prieto 2005 Molecule 10:65-80) of peptide are combined with microparticles of polymer. One or more sustained release implants can be placed in the large intestine, the small intestine or both. U.S. Pat. No. 6,011,011 and WO 94/06452 describe a sustained release formulation providing either polyethylene glycols (i.e. PEG 300 and PEG 400) or triacetin. WO 03/053401 describes a formulation which may both enhance bioavailability and provide controlled release of the agent within the GI tract. Additional controlled release formulations are described in U.S. Pat. No. 6,734,188, WO 02/38129, EP 326 151, U.S. Pat. No. 5,236,704, WO 02/30398, WO 98/13029; U.S. 20030064105, U.S. 20030138488A1, U.S. 20030216307A1, U.S. Pat. No. 6,667,060, WO 01/49249, WO 01/49311, WO 01/49249, WO 01/49311, and U.S. Pat. No. 5,877,224.

[0204] The agents can be administered, e.g., by intravenous injection, intramuscular injection, subcutaneous injection, intraperitoneal injection, topical, sublingual, intraarticular (in the joints), intradermal, buccal, ophthalmic (including intraocular), intranasaly (including using a cannula), intraspinally, intrathecally, or by other routes. The agents can be administered orally, e.g., as a tablet or cachet containing a predetermined amount of the active ingredient, gel, pellet, paste, syrup, bolus, electuary, slurry, capsule, powder, lyophilized powder, granules, sachet, as a solution or a suspension in an aqueous liquid or a non-aqueous liquid, as an oil-in-water liquid emulsion or a water-in-oil liquid emulsion, via a micellar formulation (see, e.g. WO 97/11682) via a liposomal formulation (see, e.g., EP 736299, WO 99/59550 and WO 97/13500), via formulations described in WO 03/094886, via bilosome (bile-salt based vesicular system), via a dendrimer, or in some other form. Orally administered compositions can include binders, lubricants, inert diluents, lubricating, surface active or dispersing agents, flavoring agents, and humectants. Orally administered formulations such as tablets may optionally be coated or scored and may be formulated so as to provide sustained, delayed or controlled release of the active ingredient therein. The agents can also be administered transdermally (i.e. via reservoir-type or matrix-type patches, microneedles, thermal poration, hypodermic needles, iontophoresis, electroporation, ultrasound or other forms of sonophoresis, jet injection, or a combination of any of the preceding methods (Prausnitz et al. 2004, Nature Reviews Drug Discovery 3:115-124)). The agents can be administered using high-velocity transdermal particle injection techniques using the hydrogel particle formulation described in U.S. 20020061336. Additional particle formulations are described in WO 00/45792, WO 00/53160, and WO 02/19989. An example of a transdermal formulation containing plaster and the absorption promoter dimethylisosorbide can be found in WO 89/04179. WO 96/11705 provides formulations suitable for transdennal adminisitration. The agents can be administered in the form a suppository or by other vaginal or rectal means. The agents can be administered in a transmembrane formulation as described in WO 90/07923. The agents can be administed non-invasively via the dehydrated particicles described in U.S. Pat. No. 6,485,706. The agent can be administered in an enteric-coated drug formulation as described in WO 02/49621. The agents can be administered intranassaly using the formulation described in U.S. Pat. No. 5,179,079. Formulations suitable for parenteral injection are described in WO 00/62759. The agents can be administered using the casein formulation described in U.S. 20030206939 and WO 00/06108. The agents can be administered using the particulate formulations described in U.S. 20020034536.

[0205] The agents, alone or in combination with other suitable components, can be administered by pulmonary route utilizing several techniques including but not limited to intratracheal instillation (delivery of solution into the lungs by syringe), intratracheal delivery of liposomes, insufflation (administration of powder formulation by syringe or any other similar device into the lungs) and aerosol inhalation. Aerosols (e.g., jet or ultrasonic nebulizers, metered-dose inhalers (MDIs), and dry-powder inhalers (DPIs)) can also be used in intranasal applications. Aerosol formulations are stable dispersions or suspensions of solid material and liquid droplets in a gaseous medium and can be placed into pressurized acceptable propellants, such as hydrofluoroalkanes (HFAs, i.e. HFA-134a and HFA-227, or a mixture thereof), dichlorodifluoromethane (or other chlorofluocarbon propellants such as a mixture of Propellants 11, 12, and/or 114), propane, nitrogen, and the like. Pulmonary formulations may include permeation enhancers such as fatty acids, saccharides, chelating agents, enzyme inhibitors (e.g., protease inhibitors), adjuvants (e.g., glycocholate, surfactin, span 85, and nafamostat), preservatives (e.g., benzalkonium chloride or chlorobutanol), and ethanol (normally up to 5% but possibly up to 20%, by weight). Ethanol is commonly included in aerosol compositions as it can improve the function of the metering valve and in some cases also improve the stability of the dispersion. Pulmonary formulations may also include surfactants which include but are not limited to bile salts and those described in U.S. Pat. No. 6,524,557 and references therein. The surfactants described in U.S. Pat. No. 6,524,557, e.g., a C8-C16 fatty acid salt, a bile salt, a phospholipid, or alkyl saccaride are advantageous in that some of them also reportedly enhance absorption of the peptide in the formulation. Also suitable in the disclosure are dry powder formulations comprising a therapeutically effective amount of active compound blended with an appropriate carrier and adapted for use in connection with a dry-powder inhaler. Absorption enhancers which can be added to dry powder formulations of the present disclosure include those described in U.S. Pat. No. 6,632,456. WO 02/080884 describes new methods for the surface modification of powders. Aerosol formulations may include U.S. Pat. No. 5,230,884, U.S. Pat. No. 5,292,499, WO 017/8694, WO 01/78696, U.S. 2003019437, U.S. 20030165436, and WO 96/40089 (which includes vegetable oil). Sustained release formulations suitable for inhalation are described in U.S. 20010036481A1, 20030232019A1, and U.S. 20040018243A1 as well as in WO 01/13891, WO 02/067902, WO 03/072080, and WO 03/079885. Pulmonary formulations containing microparticles are described in WO 03/015750, U.S. 20030008013, and WO 00/00176. Pulmonary formulations containing stable glassy state powder are described in U.S. 20020141945 and U.S. Pat. No. 6,309,671. Other aerosol formulations are described in EP 1338272A1 WO 90/09781, U.S. Pat. No. 5,348,730, U.S. Pat. No. 6,436,367, WO 91/04011, and U.S. Pat. No. 6,294,153 and U.S. Pat. No. 6,290,987 describes a liposomal based formulation that can be administered via aerosol or other means. Powder formulations for inhalation are described in U.S. 20030053960 and WO 01/60341. The agents can be administered intranasally as described in U.S. 20010038824. The agents can be incorporated into microemulsions, which generally are thermodynamically stable, isotropically clear dispersions of two immiscible liquids, such as oil and water, stabilized by an interfacial film of surfactant molecules (Encyclopedia of Pharmaceutical Technology (New York: Marcel Dekker, 1992), volume 9). For the preparation of microemulsions, surfactant (emulsifier), co-surfactant (co-emulsifier), an oil phase and a water phase are necessary. Suitable surfactants include any surfactants that are useful in the preparation of emulsions, e.g., emulsifiers that are typically used in the preparation of creams. The co-surfactant (or “co-emulsifer”) is generally selected from the group of polyglycerol derivatives, glycerol derivatives and fatty alcohols. Preferred emulsifier/co-emulsifier combinations are generally although not necessarily selected from the group consisting of glyceryl monostearate and polyoxyethylene stearate; polyethylene glycol and ethylene glycol palmitostearate; and caprilic and capric triglycerides and oleoyl macrogolglycerides. The water phase includes not only water but also, typically, buffers, glucose, propylene glycol, polyethylene glycols, preferably lower molecular weight polyethylene glycols (e.g., PEG 300 and PEG 400), and/or glycerol, and the like, while the oil phase will generally comprise, for example, fatty acid esters, modified vegetable oils, silicone oils, mixtures of mono- di- and triglycerides, mono- and di-esters of PEG (e.g., oleoyl macrogol glycerides), etc.

[0206] The agents described herein can be incorporated into pharmaceutically-acceptable nanoparticle, nanosphere, and nanocapsule formulations (Delie and Blanco-Prieto 2005 Molecule 10:65-80). Nanocapsules can generally entrap compounds in a stable and reproducible way (Henry-Michelland et al., 1987; Quintanar-Guerrero et al., 1998; Douglas et al., 1987). To avoid side effects due to intracellular polymeric overloading, ultrafine particles (sized around 0.1 μm) can be designed using polymers able to be degraded in vivo (e.g. biodegradable polyalkyl-cyanoacrylate nanoparticles). Such particles are described in the prior art (Couvreur et al, 1980; 1988; zur Muhlen et al., 1998; Zambaux et al. 1998; Pinto-Alphandry et al., 1995 and U.S. Pat. No. 5,145,684).

[0207] The agents described herein can be formulated with pH sensitive materials which may include those described in WO04041195 (including the seal and enteric coating described therein) and pH-sensitive coatings that achieve delivery in the colon including those described in U.S. Pat. No. 4,910,021 and WO9001329. U.S. Pat. No. 4,910,021 describes using a pH-sensitive material to coat a capsule. WO9001329 describes using pH-sensitive coatings on beads containing acid, where the acid in the bead core prolongs dissolution of the pH-sensitive coating. U.S. Pat. No. 5,175,003 discloses a dual mechanism polymer mixture composed of pH-sensitive enteric materials and film-forming plasticizers capable of conferring permeability to the enteric material, for use in drug-delivery systems; a matrix pellet composed of a dual mechanism polymer mixture permeated with a drug and sometimes covering a pharmaceutically neutral nucleus; a membrane-coated pellet comprising a matrix pellet coated with a dual mechanism polymer mixture envelope of the same or different composition; and a pharmaceutical dosage form containing matrix pellets. The matrix pellet releases acid-soluble drugs by diffusion in acid pH and by disintegration at pH levels of nominally about 5.0 or higher. The agents described herein may be formulated in the pH triggered targeted control release systems described in WO04052339. The agents described herein may be formulated according to the methodology described in any of WO03105812 (extruded hyrdratable polymers); WO0243767 (enzyme cleavable membrane translocators); WO03007913 and WO03086297 (mucoadhesive systems); WO02072075 (bilayer laminated formulation comprising pH lowering agent and absorption enhancer); WO04064769 (amidated peptides); WO05063156 (solid lipid suspension with pseudotropic and/or thixotropic properties upon melting); WO03035029 and WO03035041 (erodible, gastric retentive dosage forms); U.S. Pat. No. 5,007,790 and U.S. Pat. No. 5,972,389 (sustained release dosage forms); WO04112711 (oral extended release compositions); WO05027878, WO02072033, and WO02072034 (delayed release compositions with natural or synthetic gum); WO05030182 (controlled release formulations with an ascending rate of release); WO05048998 (microencapsulation system); U.S. Pat. No. 5,952,314 (biopolymer); U.S. Pat. No. 5,108,758 (glassy amylose matrix delivery); U.S. Pat. No. 5,840,860 (modified starch based delivery). JP10324642 (delivery system comprising chitosan and gastric resistant material such as wheat gliadin or zein); U.S. Pat. No. 5,866,619 and U.S. Pat. No. 6,368,629 (saccharide containing polymer); U.S. Pat. No. 6,531,152 (describes a drug delivery system containing a water soluble core (Ca pectinate or other water-insoluble polymers) and outer coat which bursts (eg hydrophobic polymer-Eudragrit)); U.S. Pat. No. 6,234,464; U.S. Pat. No. 6,403,130 (coating with polymer containing casein and high methoxy pectin; WO0174175 (Maillard reaction product); WO05063206 (solubility increasing formulation); WO04019872 (transferring fusion proteins). The agents described herein may be formulated using gastrointestinal retention system technology (GIRES; Merrion Pharmaceuticals). GIRES comprises a controlled-release dosage form inside an inflatable pouch, which is placed in a drug capsule for oral administration. Upon dissolution of the capsule, a gas-generating system inflates the pouch in the stomach where it is retained for 16-24 hours, all the time releasing agents described herein.

[0208] The agents described herein can be formulated in an osmotic device including the ones disclosed in U.S. Pat. No. 4,503,030, U.S. Pat. No. 5,609,590 and U.S. Pat. No. 5,358,502. U.S. Pat. No. 4,503,030 discloses an osmotic device for dispensing a drug to certain pH regions of the gastrointestinal tract. More particularly, the disclosure relates to an osmotic device comprising a wall formed of a semi-permeable pH sensitive composition that surrounds a compartment containing a drug, with a passageway through the wall connecting the exterior of the device with the compartment. The device delivers the drug at a controlled rate in the region of the gastrointestinal tract having a pH of less than 3.5, and the device self-destructs and releases all its drug in the region of the gastrointestinal tract having a pH greater than 3.5, thereby providing total availability for drug absorption. U.S. Pat. Nos. 5,609,590 and 5,358,502 disclose an osmotic bursting device for dispensing a beneficial agent to an aqueous environment. The device comprises a beneficial agent and osmagent surrounded at least in part by a semi-permeable membrane. The beneficial agent may also function as the osmagent. The semi-permeable membrane is permeable to water and substantially impermeable to the beneficial agent and osmagent. A trigger means is attached to the semi-permeable membrane (e.g., joins two capsule halves). The trigger means is activated by a pH of from 3 to 9 and triggers the eventual, but sudden, delivery of the beneficial agent. These devices enable the pH-triggered release of the beneficial agent core as a bolus by osmotic bursting.

[0209] The agents described herein may be formulated based on the disclosure described in U.S. Pat. No. 5,316,774 which discloses a composition for the controlled release of an active substance comprising a polymeric particle matrix, where each particle defines a network of internal pores. The active substance is entrapped within the pore network together with a blocking agent having physical and chemical characteristics selected to modify the release rate of the active substance from the internal pore network. In one embodiment, drugs may be selectively delivered to the intestines using an enteric material as the blocking agent. The enteric material remains intact in the stomach but degrades under the pH conditions of the intestines. In another embodiment, the sustained release formulation employs a blocking agent, which remains stable under the expected conditions of the environment to which the active substance is to be released. The use of pH-sensitive materials alone to achieve site-specific delivery is difficult because of leaking of the beneficial agent prior to the release site or desired delivery time and it is difficult to achieve long time lags before release of the active ingredient after exposure to high pH (because of rapid dissolution or degradation of the pH-sensitive materials).

[0210] The agents may also be formulated in a hybrid system which combines pH-sensitive materials and osmotic delivery systems. These hybrid devices provide delayed initiation of sustained-release of the beneficial agent. In one device a pH-sensitive matrix or coating dissolves releasing osmotic devices that provide sustained release of the beneficial agent see U.S. Pat. Nos. 4,578,075, 4,681,583, and 4,851,231. A second device consists of a semipermeable coating made of a polymer blend of an insoluble and a pH-sensitive material. As the pH increases, the permeability of the coating increases, increasing the rate of release of beneficial agent see U.S. Pat. Nos. 4,096,238, 4,503,030, 4,522,625, and 4,587,117.

[0211] The agents described herein may be formulated in terpolumers according to U.S. Pat. No. 5,484,610 which discloses terpolymers which are sensitive to pH and temperature which are useful carriers for conducting bioactive agents through the gastric juices of the stomach in a protected form. The terpolymers swell at the higher physiologic pH of the intestinal tract causing release of the bioactive agents into the intestine. The terpolymers are linear and are made up of 35 to 99 wt % of a temperature sensitive component, which imparts to the terpolymer LCST (lower critical solution temperature) properties below body temperatures, 1 to 30 wt % of a pH sensitive component having a pKa in the range of from 2 to 8 which functions through ionization or deionization of carboxylic acid groups to prevent the bioactive agent from being lost at low pH but allows bioactive agent release at physiological pH of about 7.4 and a hydrophobic component which stabilizes the LCST below body temperatures and compensates for bioactive agent effects on the terpolymers. The terpolymers provide for safe bioactive agent loading, a simple procedure for dosage form fabrication and the terpolymer functions as a protective carrier in the acidic environment of the stomach and also protects the bioactive agents from digestive enzymes until the bioactive agent is released in the intestinal tract.

[0212] The agents described herein may be formulated in pH sensitive polymers according to those described in U.S. Pat. No. 6,103,865. U.S. Pat. No. 6,103,865 discloses pH-sensitive polymers containing sulfonamide groups, which can be changed in physical properties, such as swellability and solubility, depending on pH and which can be applied for a drug-delivery system, bio-material, sensor, and the like, and a preparation method therefore. The pH-sensitive polymers are prepared by introduction of sulfonamide groups, various in pKa, to hydrophilic groups of polymers either through coupling to the hydrophilic groups of polymers, such as acrylamide, N,N-dimethylacrylamide, acrylic acid, N-isopropylacrylamide and the like or copolymerization with other polymerizable monomers. These pH-sensitive polymers may have a structure of linear polymer, grafted copolymer, hydrogel or interpenetrating network polymer.

[0213] The agents described herein may be formulated according U.S. Pat. No. 5,656,292 which discloses a composition for pH dependent or pH regulated controlled release of active ingredients especially drugs. The composition consists of a compactable mixture of the active ingredient and starch molecules substituted with acetate and dicarboxylate residues. The preferred dicarboxylate acid is succinate. The average substitution degree of the acetate residue is at least 1 and 0.2-1.2 for the dicarboxylate residue. The starch molecules can have the acetate and dicarboxylate residues attached to the same starch molecule backbone or attached to separate starch molecule backbones. The present disclosure also discloses methods for preparing said starch acetate dicarboxylates by transesterification or mixing of starch acetates and starch dicarboxylates respectively.

[0214] The agents described herein may be formulated according to the methods described in U.S. Pat. Nos. 5,554,147, 5,788,687, and 6,306,422 which disclose a method for the controlled release of a biologically active agent wherein the agent is released from a hydrophobic, pH-sensitive polymer matrix. The polymer matrix swells when the environment reaches pH 8.5, releasing the active agent. A polymer of hydrophobic and weakly acidic comonomers is disclosed for use in the controlled release system. Also disclosed is a specific embodiment in which the controlled release system may be used. The pH-sensitive polymer is coated onto a latex catheter used in ureteral catheterization. A ureteral catheter coated with a pH-sensitive polymer having an antibiotic or urease inhibitor trapped within its matrix will release the active agent when exposed to high pH urine.

[0215] The agents described herein may be formulated in/with bioadhesive polymers according to U.S. Pat. No. 6,365,187. Bioadhesive polymers in the form of, or as a coating on, microcapsules containing drugs or bioactive substances which may serve for therapeutic, or diagnostic purposes in diseases of the gastrointestinal tract, are described in U.S. Pat. No. 6,365,187. The polymeric microspheres all have a bioadhesive force of at least 11 mN/cm² (110 N/m2) Techniques for the fabrication of bioadhesive microspheres, as well as a method for measuring bioadhesive forces between microspheres and selected segments of the gastrointestinal tract in vitro are also described. This quantitative method provides a means to establish a correlation between the chemical nature, the surface morphology and the dimensions of drug-loaded microspheres on one hand and bioadhesive forces on the other, allowing the screening of the most promising materials from a relatively large group of natural and synthetic polymers which, from theoretical consideration, should be used for making bioadhesive microspheres. Solutions of medicament in buffered saline and similar vehicles are commonly employed to generate an aerosol in a nebulizer. Simple nebulizers operate on Bernoulli's principle and employ a stream of air or oxygen to generate the spray particles. More complex nebulizers employ ultrasound to create the spray particles. Both types are well known in the art and are described in standard textbooks of pharmacy such as Sprowls' American Pharmacy and Remington's The Science and Practice of Pharmacy. Other devices for generating aerosols employ compressed gases, usually hydrofluorocarbons and chlorofluorocarbons, which are mixed with the medicament and any necessary excipients in a pressurized container, these devices are likewise described in standard textbooks such as Sprowls and Remington.

[0216] The agents can be a free acid or base, or a pharmacologically acceptable salt thereof. Solids can be dissolved or dispersed immediately prior to administration or earlier. In some circumstances the preparations include a preservative to prevent the growth of microorganisms. The pharmaceutical forms suitable for injection can include sterile aqueous or organic solutions or dispersions which include, e.g., water, an alcohol, an organic solvent, an oil or other solvent or dispersant (e.g., glycerol, propylene glycol, polyethylene glycol, and vegetable oils). The formulations may contain antioxidants, buffers, bacteriostats, and solutes that render the formulation isotonic with the blood of the intended recipient, and aqueous and non-aqueous sterile suspensions that can include suspending agents, solubilizers, thickening agents, stabilizers, and preservatives. Pharmaceutical agents can be sterilized by filter sterilization or by other suitable means. The agent can be fused to immunoglobulins or albumin, albumin variants or fragments thereof, or incorporated into a liposome to improve half-life. Thus the peptides described herein may be fused directly or via a peptide linker, water soluble polymer, or prodrug linker to albumin or an analog, fragment, or derivative thereof. Generally, the albumin proteins that are part of the fusion proteins of the present disclosure may be derived from albumin cloned from any species, including human. Human serum albumin (HSA) consists of a single non-glycosylated peptide chain of 585 amino acids with a formula molecular weight of 66,500. The amino acid sequence of human HSA is known [See Meloun, et al. (1975) FEBS Letters 58:136; Behrens, et al. (1975) Fed. Proc. 34:591; Lawn, et al. (1981) Nucleic Acids Research 9:6102-6114; Minghetti, et al. (1986) J. Biol. Chem. 261:6747, each of which are incorporated by reference herein]. A variety of polymorphic variants as well as analogs and fragments of albumin have been described. [See Weitkamp, et al., (1973) Ann. Hum. Genet. 37:219]. For example, in EP 322,094, various shorter forms of HSA. Some of these fragments of HSA are disclosed, including HSA(1-373), HSA(1-388), HSA(1-389), HSA(1-369), and HSA(1-419) and fragments between 1-369 and 1-419. EP 399,666 discloses albumin fragments that include HSA(1-177) and HSA(1-200) and fragments between HSA(1-177) and HSA(1-200). Methods related to albumin fusion proteins can be found in U.S. Pat. No. 7,056,701, U.S. Pat. No. 6,994,857, U.S. Pat. No. 6,946,134, U.S. Pat. No. 6,926,898, and U.S. Pat. No. 6,905,688 and the related priority documents and references cited therein. The agent can also be conjugated to polyethylene glycol (PEG) chains. Methods for pegylation and additional formulations containing PEG-conjugates (i.e. PEG-based hydrogels, PEG modified liposomes) can be found in Harris and Chess, Nature Reviews Drug Discovery 2: 214-221 and the references therein. Peptides can also be modified with alkyl groups (e.g., C1-C20 straight or branched alkyl groups); fatty acid radicals; and combinations of PEG, alkyl groups and fatty acid radicals (see U.S. Pat. No. 6,309,633; Soltero et al., 2001 Innovations in Pharmaceutical Technology 106-110). The agent can be administered via a nanocochleate or cochleate delivery vehicle (BioDelivery Sciences International). The agents can be delivered transmucosally (i.e. across a mucosal surface such as the vagina, eye or nose) using formulations such as that described in U.S. Pat. No. 5,204,108. The agents can be formulated in microcapsules as described in WO 88/01165. The agent can be administered intra-orally using the formulations described in U.S. 20020055496, WO 00/47203, and U.S. Pat. No. 6,495,120. The agent can be delivered using nanoemulsion formulations described in WO 01/91728A2.

### Controlled Release Formulations

[0217] In general, one can provide for controlled release of the agents described herein through the use of a wide variety of polymeric carriers and controlled release systems including erodible and non-erodible matrices, osmotic control devices, various reservoir devices, enteric coatings and multiparticulate control devices.

[0218] Matrix devices are a common device for controlling the release of various agents. In such devices, the agents described herein are generally present as a dispersion within the polymer matrix, and are typically formed by the compression of a polymer/drug mixture or by dissolution or melting. The dosage release properties of these devices may be dependent upon the solubility of the agent in the polymer matrix or, in the case of porous matrices, the solubility in the sink solution within the pore network, and the tortuosity of the network. In one instance, when utilizing an erodible polymeric matrix, the matrix imbibes water and forms an aqueous-swollen gel that entraps the agent. The matrix then gradually erodes, swells, disintegrates or dissolves in the GI tract, thereby controlling release of one or more of the agents described herein. In non-erodible devices, the agent is released by diffusion through an inert matrix.

[0219] Agents described herein can be incorporated into an erodible or non-erodible polymeric matrix controlled release device. By an erodible matrix is meant aqueous-erodible or water-swellable or aqueous-soluble in the sense of being either erodible or swellable or dissolvable in pure water or requiring the presence of an acid or base to ionize the polymeric matrix sufficiently to cause erosion or dissolution. When contacted with the aqueous environment of use, the erodible polymeric matrix imbibes water and forms an aqueous-swollen gel or matrix that entraps the agent described herein. The aqueous-swollen matrix gradually erodes, swells, disintegrates or dissolves in the environment of use, thereby controlling the release of a compound described herein to the environment of use.

[0220] The erodible polymeric matrix into which an agent described herein can be incorporated may generally be described as a set of excipients that are mixed with the agent following its formation that, when contacted with the aqueous environment of use imbibes water and forms a water-swollen gel or matrix that entraps the drug form. Drug release may occur by a variety of mechanisms, for example, the matrix may disintegrate or dissolve from around particles or granules of the agent or the agent may dissolve in the imbibed aqueous solution and diffuse from the tablet, beads or granules of the device. One ingredient of this water-swollen matrix is the water-swellable, erodible, or soluble polymer, which may generally be described as an osmopolymer, hydrogel or water-swellable polymer. Such polymers may be linear, branched, or crosslinked. The polymers may be homopolymers or copolymers. In certain embodiments, they may be synthetic polymers derived from vinyl, acrylate, methacrylate, urethane, ester and oxide monomers. In other embodiments, they can be derivatives of naturally occurring polymers such as polysaccharides (e.g. chitin, chitosan, dextran and pullulan; gum agar, gum arabic, gum karaya, locust bean gum, gum tragacanth, carrageenans, gum ghatti, guar gum, xanthan gum and scleroglucan), starches (e.g. dextrin and maltodextrin), hydrophilic colloids (e.g. pectin), phosphatides (e.g. lecithin), alginates (e.g. ammonium alginate, sodium, potassium or calcium alginate, propylene glycol alginate), gelatin, collagen, and cellulosics. Cellulosics are cellulose polymer that has been modified by reaction of at least a portion of the hydroxyl groups on the saccharide repeat units with a compound to form an ester-linked or an ether-linked substituent. For example, the cellulosic ethyl cellulose has an ether linked ethyl substituent attached to the saccharide repeat unit, while the cellulosic cellulose acetate has an ester linked acetate substituent. In certain embodiments, the cellulosics for the erodible matrix comprises aqueous-soluble and aqueous-erodible cellulosics can include, for example, ethyl cellulose (EC), methylethyl cellulose (MEC), carboxymethyl cellulose (CMC), CMEC, hydroxyethyl cellulose (HEC), hydroxypropyl cellulose (HPC), cellulose acetate (CA), cellulose propionate (CP), cellulose butyrate (CB), cellulose acetate butyrate (CAB), CAP, CAT, hydroxypropyl methyl cellulose (HPMC), HPMCP, HPMCAS, hydroxypropyl methyl cellulose acetate trimellitate (HPMCAT), and ethylhydroxy ethylcellulose (EHEC). In certain embodiments, the cellulosics comprises various grades of low viscosity (MW less than or equal to 50,000 daltons, for example, the Dow Methocel™ series E5, E15LV, E50LV and K100LY) and high viscosity (MW greater than 50,000 daltons, for example, E4MCR, E10MCR, K4M, K15M and K100M and the Methocer K series) HPMC. Other commercially available types of HPMC include the Shin Etsu Metolose 90SH series.

[0221] The choice of matrix material can have a large effect on the maximum drug concentration attained by the device as well as the maintenance of a high drug concentration. The matrix material can be a concentration-enhancing polymer, for example, as described in WO05/011634.

[0222] Other materials useful as the erodible matrix material include, but are not limited to, pullulan, polyvinyl pyrrolidone, polyvinyl alcohol, polyvinyl acetate, glycerol fatty acid esters, polyacrylamide, polyacrylic acid, copolymers of ethacrylic acid or methacrylic acid (EUDRAGITO, Rohm America, Inc., Piscataway, N.J.) and other acrylic acid derivatives such as homopolymers and copolymers of butylmethacrylate, methylmethacrylate, ethylmethacrylate, ethylacrylate, (2-dimethylaminoethyl) methacrylate, and (trimethylaminoethyl) methacrylate chloride.

[0223] The erodible matrix polymer may contain a wide variety of the same types of additives and excipients known in the pharmaceutical arts, including osmopolymers, osmagens, solubility-enhancing or -retarding agents and excipients that promote stability or processing of the device.

[0224] Alternatively, the agents of the present disclosure may be administered by or incorporated into a non-erodible matrix device. In such devices, an agent described herein is distributed in an inert matrix. The agent is released by diffusion through the inert matrix. Examples of materials suitable for the inert matrix include insoluble plastics (e.g methyl acrylate-methyl methacrylate copolymers, polyvinyl chloride, polyethylene), hydrophilic polymers (e.g. ethyl cellulose, cellulose acetate, crosslinked polyvinylpyrrolidone (also known as crospovidone)), and fatty compounds (e.g. carnauba wax, microcrystalline wax, and triglycerides). Such devices are described further in Remington: The Science and Practice of Pharmacy, 20th edition (2000).

[0225] Matrix controlled release devices may be prepared by blending an agent described herein and other excipients together, and then forming the blend into a tablet, caplet, pill, or other device formed by compressive forces. Such compressed devices may be formed using any of a wide variety of presses used in the fabrication of pharmaceutical devices. Examples include single-punch presses, rotary tablet presses, and multilayer rotary tablet presses, all well known in the art. See for example, Remington: The Science and Practice of Pharmacy, 20th Edition, 2000. The compressed device may be of any shape, including round, oval, oblong, cylindrical, or triangular. The upper and lower surfaces of the compressed device may be flat, round, concave, or convex.

[0226] In certain embodiments, when formed by compression, the device has a strength of at least 5 Kiloponds (Kp)/cm² (for example, at least 7 Kp/cm²). Strength is the fracture force, also known as the tablet hardness required to fracture a tablet formed from the materials, divided by the maximum cross-sectional area of the tablet normal to that force. The fracture force may be measured using a Schleuniger Tablet Hardness Tester, Model 6D. The compression force required to achieve this strength will depend on the size of the tablet, but generally will be greater than about 5 kP/cm². Friability is a well-know measure of a device's resistance to surface abrasion that measures weight loss in percentage after subjecting the device to a standardized agitation procedure. Friability values of from 0.8 to 1.0% are regarded as constituting the upper limit of acceptability. Devices having a strength of greater than 5 kP/cm² generally are very robust, having a friability of less than 0.5%. Other methods for forming matrix controlled-release devices are well known in the pharmaceutical arts. See for example, Remington: The Science and Practice of Pharmacy, 20th Edition, 2000.

[0227] As noted above, the agents described herein may also be incorporated into an osmotic control device. Such devices generally include a core containing one or more agents as described herein and a water permeable, non-dissolving and non-eroding coating surrounding the core which controls the influx of water into the core from an aqueous environment of use so as to cause drug release by extrusion of some or all of the core to the environment of use. In certain embodiments, the coating is polymeric, aqueous-permeable, and has at least one delivery port. The core of the osmotic device optionally includes an osmotic agent which acts to imbibe water from the surrounding environment via such a semi-permeable membrane. The osmotic agent contained in the core of this device may be an aqueous-swellable hydrophilic polymer or it may be an osmogen, also known as an osmagent. Pressure is generated within the device which forces the agent(s) out of the device via an orifice (of a size designed to minimize solute diffusion while preventing the build-up of a hydrostatic pressure head).

[0228] Osmotic agents create a driving force for transport of water from the environment of use into the core of the device. Osmotic agents include but are not limited to water-swellable hydrophilic polymers, and osmogens (or osmagens). Thus, the core may include water-swellable hydrophilic polymers, both ionic and nonionic, often referred to as osmopolymers and hydrogels. The amount of water-swellable hydrophilic polymers present in the core may range from about 5 to about 80 wt % (including for example, 10 to 50 wt %). Nonlimiting examples of core materials include hydrophilic vinyl and acrylic polymers, polysaccharides such as calcium alginate, polyethylene oxide (PEO), polyethylene glycol (PEG), polypropylene glycol (PPG), poly (2-hydroxyethyl methacrylate), poly (acrylic) acid, poly (methacrylic) acid, polyvinylpyrrolidone (PVP) and crosslinked PVP, polyvinyl alcohol (PVA), PVA/PVP copolymers and PVA/PVP copolymers with hydrophobic monomers such as methyl methacrylate, vinyl acetate, and the like, hydrophilic polyurethanes containing large PEO blocks, sodium croscarmellose, carrageenan, hydroxyethyl cellulose (HEC), hydroxypropyl cellulose (HPC), hydroxypropyl methyl cellulose (HPMC), carboxymethyl cellulose (CMC) and carboxyethyl cellulose (CEC), sodium alginate, polycarbophil, gelatin, xanthan gum, and sodium starch glycolat. Other materials include hydrogels comprising interpenetrating networks of polymers that may be formed by addition or by condensation polymerization, the components of which may comprise hydrophilic and hydrophobic monomers such as those just mentioned. Water-swellable hydrophilic polymers include but are not limited to PEO, PEG, PVP, sodium croscarmellose, HPMC, sodium starch glycolate, polyacrylic acid and crosslinked versions or mixtures thereof.

[0229] The core may also include an osmogen (or osmagent). The amount of osmogen present in the core may range from about 2 to about 70 wt % (including, for example, from 10 to 50 wt %). Typical classes of suitable osmogens are water-soluble organic acids, salts and sugars that are capable of imbibing water to thereby effect an osmotic pressure gradient across the barrier of the surrounding coating. Typical useful osmogens include but are not limited to magnesium sulfate, magnesium chloride, calcium chloride, sodium chloride, lithium chloride, potassium sulfate, sodium carbonate, sodium sulfite, lithium sulfate, potassium chloride, sodium sulfate, mannitol, xylitol, urea, sorbitol, inositol, raffinose, sucrose, glucose, fructose, lactose, citric acid, succinic acid, tartaric acid, and mixtures thereof. In certain embodiments, the osmogen is glucose, lactose, sucrose, mannitol, xylitol, sodium chloride, including combinations thereof.

[0230] The core may include a wide variety of additives and excipients that enhance the performance of the dosage form or that promote stability, tableting or processing. Such additives and excipients include tableting aids, surfactants, water-soluble polymers, pH modifiers, fillers, binders, pigments, disintegrants, antioxidants, lubricants and flavorants. Nonlimiting examples of additives and excipients include but are not limited to those described elsewhere herein as well as microcrystalline cellulose, metallic salts of acids (e.g. aluminum stearate, calcium stearate, magnesium stearate, sodium stearate, zinc stearate), pH control agents (e.g. buffers, organic acids, organic acid salts, organic and inorganic bases), fatty acids, hydrocarbons and fatty alcohols (e.g. stearic acid, palmitic acid, liquid paraffin, stearyl alcohol, and palmitol), fatty acid esters (e.g. glyceryl (mono- and di-) stearates, triglycerides, glyceryl (palmiticstearic) ester, sorbitan esters (e.g. sorbitan monostearate, saccharose monostearate, saccharose monopalmitate, sodium stearyl fumarate), polyoxyethylene sorbitan esters), surfactants (e.g. alkyl sulfates (e.g. sodium lauryl sulfate, magnesium lauryl sulfate), polymers (e.g. polyethylene glycols, polyoxyethylene glycols, polyoxyethylene, polyoxypropylene ethers, including copolymers thereof), polytetrafluoroethylene), and inorganic materials (e.g. talc, calcium phosphate), cyclodextrins, sugars (e.g. lactose, xylitol), sodium starch glycolate). Nonlimiting examples of disintegrants are sodium starch glycolate (e.g., Explotab™ CLV, (microcrystalline cellulose (e.g., Avicel™), microcrystalline silicified cellulose (e.g., ProSolv™), croscarmellose sodium (e.g., Ac-Di-Sol™). When the agent described herein is a solid amorphous dispersion formed by a solvent process, such additives may be added directly to the spray-drying solution when forming an agent described herein/concentration-enhancing polymer dispersion such that the additive is dissolved or suspended in the solution as a slurry, Alternatively, such additives may be added following the spray-drying process to aid in forming the final controlled release device.

[0231] A nonlimiting example of an osmotic device consists of one or more drug layers containing an agent described herein, such as a solid amorphous drug/polymer dispersion, and a sweller layer that comprises a water-swellable polymer, with a coating surrounding the drug layer and sweller layer. Each layer may contain other excipients such as tableting aids, osmagents, surfactants, water-soluble polymers and water-swellable polymers.

[0232] Such osmotic delivery devices may be fabricated in various geometries including bilayer (wherein the core comprises a drug layer and a sweller layer adjacent to each other), trilayer (wherein the core comprises a swelter layer sandwiched between two drug layers) and concentric (wherein the core comprises a central sweller agent surrounded by the drug layer). The coating of such a tablet comprises a membrane permeable to water but substantially impermeable to drug and excipients contained within. The coating contains one or more exit passageways or ports in communication with the drug-containing layer(s) for delivering the drug agent. The drug-containing layer(s) of the core contains the drug agent (including optional osmagents and hydrophilic water-soluble polymers), while the sweller layer consists of an expandable hydrogel, with or without additional osmotic agents.

[0233] When placed in an aqueous medium, the tablet imbibes water through the membrane, causing the agent to form a dispensable aqueous agent, and causing the hydrogel layer to expand and push against the drug-containing agent, forcing the agent out of the exit passageway. The agent can swell, aiding in forcing the drug out of the passageway. Drug can be delivered from this type of delivery system either dissolved or dispersed in the agent that is expelled from the exit passageway.

[0234] The rate of drug delivery is controlled by such factors as the permeability and thickness of the coating, the osmotic pressure of the drug-containing layer, the degree of hydrophilicity of the hydrogel layer, and the surface area of the device. Those skilled in the art will appreciate that increasing the thickness of the coating will reduce the release rate, while any of the following will increase the release rate: increasing the permeability of the coating; increasing the hydrophilicity of the hydrogel layer; increasing the osmotic pressure of the drug-containing layer; or increasing the device's surface area.

[0235] Other materials useful in forming the drug-containing agent, in addition to the agent described herein itself, include HPMC, PEO and PVP and other pharmaceutically acceptable carriers. In addition, osmagents such as sugars or salts, including but not limited to sucrose, lactose, xylitol, mannitol, or sodium chloride, may be added. Materials which are useful for forming the hydrogel layer include sodium CMC, PEO (e.g. polymers having an average molecular weight from about 5,000,000 to about 7,500,000 daltons), poly (acrylic acid), sodium (polyacrylate), sodium croscarmellose, sodium starch glycolat, PVP, crosslinked PVP, and other high molecular weight hydrophilic materials.

[0236] In the case of a bilayer geometry, the delivery port(s) or exit passageway(s) may be located on the side of the tablet containing the drug agent or may be on both sides of the tablet or even on the edge of the tablet so as to connect both the drug layer and the sweller layer with the exterior of the device. The exit passageway(s) may be produced by mechanical means or by laser drilling, or by creating a difficult-to-coat region on the tablet by use of special tooling during tablet compression or by other means.

[0237] The osmotic device can also be made with a homogeneous core surrounded by a semipermeable membrane coating, as in U.S. Pat. No. 3,845,770. The agent described herein can be incorporated into a tablet core and a semipermeable membrane coating can be applied via conventional tablet-coating techniques such as using a pan coater. A drug delivery passageway can then be formed in this coating by drilling a hole in the coating, either by use of a laser or mechanical means. Alternatively, the passageway may be formed by rupturing a portion of the coating or by creating a region on the tablet that is difficult to coat, as described above. In one embodiment, an osmotic device comprises: (a) a single-layer compressed core comprising: (i) an agent described herein, (ii) a hydroxyethylcellulose, and (iii) an osmagent, wherein the hydroxyethylcellulose is present in the core from about 2.0% to about 35% by weight and the osmagent is present from about 15% to about 70% by weight; (b) a water-permeable layer surrounding the core; and (c) at least one passageway within the water-permeable layer (b) for delivering the drug to a fluid environment surrounding the tablet. In certain embodiments, the device is shaped such that the surface area to volume ratio (of a water-swollen tablet) is greater than 0.6 min⁻¹ (including, for example, greater than 1.0 mm⁻¹). The passageway connecting the core with the fluid environment can be situated along the tablet band area. In certain embodiments, the shape is an oblong shape where the ratio of the tablet tooling axes, i.e., the major and minor axes which define the shape of the tablet, are between 1.3 and 3 (including, for example, between 1.5 and 2.5). In one embodiment, the combination of the agent described herein and the osmagent have an average ductility from about 100 to about 200 Mpa, an average tensile strength from about 0.8 to about 2.0 Mpa, and an average brittle fracture index less than about 0.2. The single-layer core may optionally include a disintegrant, a bioavailability enhancing additive, and/or a pharmaceutically acceptable excipient, carrier or diluent.

[0238] In certain embodiments, entrainment of particles of agents described herein in the extruding fluid during operation of such osmotic device is desirable. For the particles to be well entrained, the agent drug form is dispersed in the fluid before the particles have an opportunity to settle in the tablet core. One means of accomplishing this is by adding a disintegant that serves to break up the compressed core into its particulate components. Nonlimiting examples of standard disintegrants include materials such as sodium starch glycolate (e.g., Explotab™ CLV), microcrystalline cellulose (e.g., Avicel™), microcrystalline silicified cellulose (e.g., ProSoIv™) and croscarmellose sodium (e.g., Ac-Di-Sol™), and other disintegrants known to those skilled in the art. Depending upon the particular formulation, some disintegants work better than others. Several disintegants tend to form gels as they swell with water, thus hindering drug delivery from the device. Non-gelling, non-swelling disintegrants provide a more rapid dispersion of the drug particles within the core as water enters the core. In certain embodiments, non-gelling, non-swelling disintegrants are resins, for example, ion-exchange resins. In one embodiment, the resin is Amberlite™ IRP 88 (available from Rohm and Haas, Philadelphia, Pa.). When used, the disintegrant is present in amounts ranging from about 50-74% of the core agent.

[0239] Water-soluble polymers are added to keep particles of the agent suspended inside the device before they can be delivered through the passageway(s) (e.g., an orifice). High viscosity polymers are useful in preventing settling. However, the polymer in combination with the agent is extruded through the passageway(s) under relatively low pressures. At a given extrusion pressure, the extrusion rate typically slows with increased viscosity. Certain polymers in combination with particles of the agent described herein form high viscosity solutions with water but are still capable of being extruded from the tablets with a relatively low force. In contrast, polymers having a low weight-average, molecular weight (<about 300,000) do not form sufficiently viscous solutions inside the tablet core to allow complete delivery due to particle settling. Settling of the particles is a problem when such devices are prepared with no polymer added, which leads to poor drug delivery unless the tablet is constantly agitated to keep the particles from settling inside the core. Settling is also problematic when the particles are large and/or of high density such that the rate of settling increases.

[0240] In certain embodiments, the water-soluble polymers for such osmotic devices do not interact with the drug. In certain embodiments the water-soluble polymer is a non-ionic polymer. A nonlimiting example of a non-ionic polymer forming solutions having a high viscosity yet still extrudable at low pressures is Natrosol™ 250H (high molecular weight hydroxyethylcellulose, available from Hercules Incorporated, Aqualon Division, Wilmington, Del.; MW equal to about 1 million daltons and a degree of polymerization equal to about 3,700). Natrosol 250H™ provides effective drug delivery at concentrations as low as about 3% by weight of the core when combined with an osmagent. Natrosol 250H™ NF is a high-viscosity grade nonionic cellulose ether that is soluble in hot or cold water. The viscosity of a 1% solution of Natrosol 250H using a Brookfield LVT (30 rpm) at 25° C. is between about 1, 500 and about 2,500 cps.

[0241] In certain embodiments, hydroxyethylcellulose polymers for use in these monolayer osmotic tablets have a weight-average, molecular weight from about 300,000 to about 1.5 million. The hydroxyethylcellulose polymer is typically present in the core in an amount from about 2.0% to about 35% by weight.

[0242] Another example of an osmotic device is an osmotic capsule. The capsule shell or portion of the capsule shell can be semipermeable. The capsule can be filled either by a powder or liquid consisting of an agent described herein, excipients that imbibe water to provide osmotic potential, and/or a water-swellable polymer, or optionally solubilizing excipients. The capsule core can also be made such that it has a bilayer or multilayer agent analogous to the bilayer, trilayer or concentric geometries described above.

[0243] Another class of osmotic device useful in this disclosure comprises coated swellable tablets, for example, as described in EP378404. Coated swellable tablets comprise a tablet core comprising an agent described herein and a swelling material, preferably a hydrophilic polymer, coated with a membrane, which contains holes, or pores through which, in the aqueous use environment, the hydrophilic polymer can extrude and carry out the agent. Alternatively, the membrane may contain polymeric or low molecular weight water-soluble porosigens. Porosigens dissolve in the aqueous use environment, providing pores through which the hydrophilic polymer and agent may extrude. Examples of porosigens are water-soluble polymers such as HPMC, PEG, and low molecular weight compounds such as glycerol, sucrose, glucose, and sodium chloride. In addition, pores may be formed in the coating by drilling holes in the coating using a laser or other mechanical means. In this class of osmotic devices, the membrane material may comprise any film-forming polymer, including polymers which are water permeable or impermeable, providing that the membrane deposited on the tablet core is porous or contains water-soluble porosigens or possesses a macroscopic hole for water ingress and drug release. Embodiments of this class of sustained release devices may also be multilayered, as described, for example, in EP378404.

[0244] When an agent described herein is a liquid or oil, such as a lipid vehicle formulation, for example as described in WO05/011634, the osmotic controlled-release device may comprise a soft-gel or gelatin capsule formed with a composite wall and comprising the liquid formulation where the wall comprises a barrier layer formed over the external surface of the capsule, an expandable layer formed over the barrier layer, and a semipermeable layer formed over the expandable layer. A delivery port connects the liquid formulation with the aqueous use environment. Such devices are described, for example, in U.S. Pat. No. 6,419,952, U.S. Pat. No. 6,342,249, U.S. Pat. No. 5,324,280, U.S. Pat. No. 4,672,850, U.S. Pat. No. 4,627,850, U.S. Pat. No. 4,203,440, and U.S. Pat. No. 3,995,631.

[0245] The osmotic controlled release devices of the present disclosure can also comprise a coating. In certain embodiments, the osmotic controlled release device coating exhibits one or more of the following features: is water-permeable, has at least one port for the delivery of drug, and is non-dissolving and non-eroding during release of the drug formulation, such that drug is substantially entirely delivered through the delivery port(s) or pores as opposed to delivery primarily via permeation through the coating material itself. Delivery ports include any passageway, opening or pore whether made mechanically, by laser drilling, by pore formation either during the coating process or in situ during use or by rupture during use. In certain embodiments, the coating is present in an amount ranging from about 5 to 30 wt % (including, for example, 10 to 20 wt %) relative to the core weight.

[0246] One form of coating is a semipermeable polymeric membrane that has the port(s) formed therein either prior to or during use. Thickness of such a polymeric membrane may vary between about 20 and 800 μm (including, for example, between about 100 to 500 μm). The diameter of the delivery port (s) may generally range in size from 0.1 to 3000 μm or greater (including, for example, from about 50 to 3000 μm in diameter). Such port(s) may be formed post-coating by mechanical or laser drilling or may be formed in situ by rupture of the coatings; such rupture may be controlled by intentionally incorporating a relatively small weak portion into the coating. Delivery ports may also be formed in situ by erosion of a plug of water-soluble material or by rupture of a thinner portion of the coating over an indentation in the core. In addition, delivery ports may be formed during coating, as in the case of asymmetric membrane coatings of the type disclosed in U.S. Pat. No. 5,612,059 and U.S. Pat. No. 5,698,220. The delivery port may be formed in situ by rupture of the coating, for example, when a collection of beads that may be of essentially identical or of a variable agent are used. Drug is primarily released from such beads following rupture of the coating and, following rupture, such release may be gradual or relatively sudden. When the collection of beads has a variable agent, the agent may be chosen such that the beads rupture at various times following administration, resulting in the overall release of drug being sustained for a desired duration.

[0247] Coatings may be dense, microporous or asymmetric, having a denser region supported by a thick porous region such as those disclosed in U.S. Pat. No. 5,612,059 and U.S. Pat. No. 5,698,220. When the coating is dense the coating can be composed of a water-permeable material. When the coating is porous, it may be composed of either a water-permeable or a water-impermeable material. When the coating is composed of a porous water-impermeable material, water permeates through the pores of the coating as either a liquid or a vapor. Nonlimiting examples of osmotic devices that utilize dense coatings include U.S. Pat. No. 3,995,631 and U.S. Pat. No. 3,845,770. Such dense coatings are permeable to the external fluid such as water and may be composed of any of the materials mentioned in these patents as well as other water-permeable polymers known in the art.

[0248] The membranes may also be porous as disclosed, for example, in U.S. Pat. No. 5,654,005 and U.S. Pat. No. 5,458,887 or even be formed from water-resistant polymers. U.S. Pat. No. 5,120,548 describes another suitable process for forming coatings from a mixture of a water-insoluble polymer and a leachable water-soluble additive. The porous membranes may also be formed by the addition of pore-formers as disclosed in U.S. Pat. No. 4,612,008. In addition, vapor-permeable coatings may even be formed from extremely hydrophobic materials such as polyethylene or polyvinylidene difluorid that, when dense, are essentially water-impermeable, as long as such coatings are porous. Materials useful in forming the coating include but are not limited to various grades of acrylic, vinyls, ethers, polyamides, polyesters and cellulosic derivatives that are water-permeable and water-insoluble at physiologically relevant pHs, or are susceptible to being rendered water-insoluble by chemical alteration such as by crosslinking. Nonlimiting examples of suitable polymers (or crosslinked versions) useful in forming the coating include plasticized, unplasticized and reinforced cellulose acetate (CA), cellulose diacetate, cellulose triacetate, CA propionate, cellulose nitrate, cellulose acetate butyrate (CAB), CA ethyl carbamate, CAP, CA methyl carbamate, CA succinate, cellulose acetate trimellitate (CAT), CA dimethylaminoacetate, CA ethyl carbonate, CA chloroacetate, CA ethyl oxalate, CA methyl sulfonate, CA butyl sulfonate, CA p-toluene sulfonate, agar acetate, amylose triacetate, beta glucan acetate, beta glucan triacetate, acetaldehyde dimethyl acetate, triacetate of locust bean gum, hydroxiated ethylene-vinylacetate, EC, PEG, PPG, PEG/PPG copolymers, PVP, HEC, HPC, CMC, CMEC, HPMC, HPMCP, HPMCAS, HPMCAT, poly (acrylic) acids and esters and poly-(methacrylic) acids and esters and copolymers thereof, starch, dextran, dextrin, chitosan, collagen, gelatin, polyalkenes, polyethers, polysulfones, polyethersulfones, polystyrenes, polyvinyl halides, polyvinyl esters and ethers, natural waxes and synthetic waxes. In various embodiments, the coating agent comprises a cellulosic polymer, in particular cellulose ethers, cellulose esters and cellulose ester-ethers, i.e., cellulosic derivatives having a mixture of ester and ether substituents, the coating materials are made or derived from poly (acrylic) acids and esters, poly (methacrylic) acids and esters, and copolymers thereof, the coating agent comprises cellulose acetate, the coating comprises a cellulosic polymer and PEG, the coating comprises cellulose acetate and PEG.

[0249] Coating is conducted in conventional fashion, typically by dissolving or suspending the coating material in a solvent and then coating by dipping, spray coating or by pan-coating. In certain embodiments, the coating solution contains 5 to 15 wt % polymer. Typical solvents useful with the cellulosic polymers mentioned above include but are not limited to acetone, methyl acetate, ethyl acetate, isopropyl acetate, n-butyl acetate, methyl isobutyl ketone, methyl propyl ketone, ethylene glycol monoethyl ether, ethylene glycol monoethyl acetate, methylene dichloride, ethylene dichloride, propylene dichloride, nitroethane, nitropropane, tetrachloroethane, 1,4-dioxane, tetrahydrofuran, diglyme, water, and mixtures thereof. Pore-formers and non-solvents (such as water, glycerol and ethanol) or plasticizers (such as diethyl phthalate) may also be added in any amount as long as the polymer remains soluble at the spray temperature. Pore-formers and their use in fabricating coatings are described, for example, in U.S. Pat. No. 5,612,059. Coatings may also be hydrophobic microporous layers wherein the pores are substantially filled with a gas and are not wetted by the aqueous medium but are permeable to water vapor, as disclosed, for example, in U.S. Pat. No. 5,798,119. Such hydrophobic but water-vapor permeable coatings are typically composed of hydrophobic polymers such as polyalkenes, polyacrylic acid derivatives, polyethers, polysulfones, polyethersulfones, polystyrenes, polyvinyl halides, polyvinyl esters and ethers, natural waxes and synthetic waxes. Hydrophobic microporous coating materials include but are not limited to polystyrene, polysulfones, polyethersulfones, polyethylene, polypropylene, polyvinyl chloride, polyvinylidene fluoride and polytetrafluoroethylene. Such hydrophobic coatings can be made by known phase inversion methods using any of vapor-quench, liquid quench, thermal processes, leaching soluble material from the coating or by sintering coating particles. In thermal processes, a solution of polymer in a latent solvent is brought to liquid-liquid phase separation in a cooling step. When evaporation of the solvent is not prevented, the resulting membrane will typically be porous. Such coating processes may be conducted by the processes disclosed, for example, in U.S. Pat. No. 4,247,498, U.S. Pat. No. 4,490,431 and U.S. Pat. No. 4,744,906. Osmotic controlled-release devices may be prepared using procedures known in the pharmaceutical arts. See for example, Remington: The Science and Practice of Pharmacy, 20th Edition, 2000.

[0250] As further noted above, the agents described herein may be provided in the form of microparticulates, generally ranging in size from about 10 μm to about 2 mm (including, for example, from about 100 μm to 1 mm in diameter). Such multiparticulates may be packaged, for example, in a capsule such as a gelatin capsule or a capsule formed from an aqueous-soluble polymer such as HPMCAS, HPMC or starch; dosed as a suspension or slurry in a liquid; or they may be formed into a tablet, caplet, or pill by compression or other processes known in the art. Such multiparticulates may be made by any known process, such as wet- and dry-granulation processes, extrusion/spheronization, roller-compaction, melt-congealing, or by spray-coating seed cores. For example, in wet- and dry-granulation processes, the agent described herein and optional excipients may be granulated to form multiparticulates of the desired size. Other excipients, such as a binder (e.g., microcrystalline cellulose), may be blended with the agent to aid in processing and forming the multiparticulates. In the case of wet granulation, a binder such as microcrystalline cellulose may be included in the granulation fluid to aid in forming a suitable multiparticulate. See, for example, Remington: The Science and Practice of Pharmacy, 20 Edition, 2000. In any case, the resulting particles may themselves constitute the therapeutic composition or they may be coated by various film-forming materials such as enteric polymers or water-swellable or water-soluble polymers, or they may be combined with other excipients or vehicles to aid in dosing to patients. Suitable pharmaceutical compositions in accordance with the disclosure will generally include an amount of the active compound(s) with an acceptable pharmaceutical diluent or excipient, such as a sterile aqueous solution, to give a range of final concentrations, depending on the intended use. The techniques of preparation are generally well known in the art, as exemplified by Remington's Pharmaceutical Sciences (18th Edition, Mack Publishing Company, 1995).

### Kits

[0251] The agents described herein and combination therapy agents can be packaged as a kit that includes single or multiple doses of two or more agents, each packaged or formulated individually, or single or multiple doses of two or more agents packaged or formulated in combination. Thus, one or more agents can be present in first container, and the kit can optionally include one or more agents in a second container. The container or containers are placed within a package, and the package can optionally include administration or dosage instructions. A kit can include additional components such as syringes or other means for administering the agents as well as diluents or other means for formulation.

[0252] Thus, the kits can comprise: a) a pharmaceutical composition comprising a compound described herein and a pharmaceutically acceptable carrier, vehicle or diluent; and b) a container or packaging. The kits may optionally comprise instructions describing a method of using the pharmaceutical compositions in one or more of the methods described herein (e.g. disorders associated with fluid and sodium retention (such as diseases of the electrolyte-water/electrolyte transport system within the kidney, gut and urogenital system, heart failure (e.g. congestive heart failure including heart failure at any of stages I-IV according to New York Heart Association (NYHA) Functional Classification), hypertension, hypotension, salt dependent forms of high blood pressure, hepatic edema, liver cirrhosis, kidney disease, polycystic kidney disease) and gastrointestinal disorders (e.g. gastrointestinal motility disorders, chronic intestinal pseudo-obstruction, colonic pseudo-obstruction, Crohn's disease, duodenogastric reflux, dyspepsia, functional dyspepsia, nonulcer dyspepsia, a functional gastrointestinal disorder, functional heartburn, gastroesophageal reflux disease (GERD), gastroparesis, irritable bowel syndrome, post-operative ileus, ulcerative colitis, chronic constipation, and disorders and conditions associated with constipation (e.g. constipation associated with use of opiate pain killers, post-surgical constipation, and constipation associated with neuropathic disorders as well as other conditions and disorders described herein)). The kit may optionally comprise a second pharmaceutical composition comprising one or more additional agents including but not limited to those including analgesic peptides and compounds, an agent used to treat heart failure (Diuretics (e.g. furesomide (Lasix), bumetanide (Bumex), ethacrynic acid (Edecrin), torsemide (Demadex), amiloride (Midamor), spironolactone (Aldactone), chorthiazide (Diuril), metolazone (Zaroxylyn)), Angiotension-Converting Enzyme (ACE) inhibitors (e.g. captopril (Capoten), enalopril (Vasotec), lisinopril (Prinivil, Zestril), ramipril (Altace)), Beta blockers (e.g. carvedilol (Coreg) and Inotropes (e.g. digoxin, dobutaimine, dopamine Milrinone)), a phosphodiesterase inhibitor, an agent used to treat gastrointestinal and other disorders (including those described herein), an agent used to treat constipation, an antidiarrheal agent, an insulin or related compound (including those described herein), an anti-hypertensive agent, an agent useful in the treatment of respiratory and other disorders, an anti-obesity agent, an anti-diabetic agents, an agent that activates soluble guanylate cyclase and a pharmaceutically acceptable carrier, vehicle or diluent. The pharmaceutical composition comprising the compound described herein and the second pharmaceutical composition contained in the kit may be optionally combined in the same pharmaceutical composition.

[0253] A kit includes a container or packaging for containing the pharmaceutical compositions and may also include divided containers such as a divided bottle or a divided foil packet. The container can be, for example a paper or cardboard box, a glass or plastic bottle or jar, a re-sealable bag (for example, to hold a “refill” of tablets for placement into a different container), or a blister pack with individual doses for pressing out of the pack according to a therapeutic schedule. It is feasible that more than one container can be used together in a single package to market a single dosage form. For example, tablets may be contained in a bottle which is in turn contained within a box.

[0254] An example of a kit is a so-called blister pack. Blister packs are well known in the packaging industry and are being widely used for the packaging of pharmaceutical unit dosage forms (tablets, capsules, and the like). Blister packs generally consist of a sheet of relatively stiff material covered with a foil of a preferably transparent plastic material. During the packaging process, recesses are formed in the plastic foil. The recesses have the size and shape of individual tablets or capsules to be packed or may have the size and shape to accommodate multiple tablets and/or capsules to be packed. Next, the tablets or capsules are placed in the recesses accordingly and the sheet of relatively stiff material is sealed against the plastic foil at the face of the foil which is opposite from the direction in which the recesses were formed. As a result, the tablets or capsules are individually sealed or collectively sealed, as desired, in the recesses between the plastic foil and the sheet. Preferably the strength of the sheet is such that the tablets or capsules can be removed from the blister pack by manually applying pressure on the recesses whereby an opening is formed in the sheet at the place of the recess. The tablet or capsule can then be removed via said opening.

[0255] It maybe desirable to provide a written memory aid containing information and/or instructions for the physician, pharmacist or subject regarding when the medication is to be taken. A “daily dose” can be a single tablet or capsule or several tablets or capsules to be taken on a given day. When the kit contains separate compositions, a daily dose of one or more compositions of the kit can consist of one tablet or capsule while a daily dose of another one or more compositions of the kit can consist of several tablets or capsules. A kit can take the form of a dispenser designed to dispense the daily doses one at a time in the order of their intended use. The dispenser can be equipped with a memory-aid, so as to further facilitate compliance with the regimen. An example of such a memory-aid is a mechanical counter which indicates the number of daily doses that have been dispensed. Another example of such a memory-aid is a battery-powered micro-chip memory coupled with a liquid crystal readout, or audible reminder signal which, for example, reads out the date that the last daily dose has been taken and/or reminds one when the next dose is to be taken.

[0256] Methods to increase chemical and/or physical stability of the agents the described herein are found in U.S. Pat. No. 6,541,606, U.S. Pat. No. 6,068,850, U.S. Pat. No. 6,124,261, U.S. Pat. No. 5,904,935, and WO 00/15224, U.S. 20030069182 (via the addition of nicotinamide), U.S. 20030175230A1, U.S. 20030175230A1, U.S. 20030175239A1, U.S. 20020045582, U.S. 20010031726, WO 02/26248, WO 03/014304, WO 98/00152A1, WO 98100157A1, WO 90/12029, WO 00/04880, and WO 91/04743, WO 97/04796 and the references cited therein.

[0257] Methods to increase bioavailability of the agents described herein are found in U.S. Pat. No. 6,008,187, U.S. Pat. No. 5,424,289, U.S. 20030198619, WO 90/01329, WO 01/49268, WO 00/32172, and WO 02/064166. Glycyrrhizinate can also be used as an absorption enhancer (see, e.g., EP397447). WO 03/004062 discusses Ulex europaeus I (UEA1) and UEAI mimetics which may be used to target the agents described herein to the GI tract. The bioavailability of the agents described herein can also be incrased by addition of oral bioavailability-enhancing agents such as those described in U.S. Pat. No. 6,818,615 including but not limited to: cyclosporins (including cyclosporins A through Z as defined in Table 1 of U.S. Pat. No. 6,818,615), for example, cyclosporin A (cyclosporin), cyclosporin F, cyclosporin D, dihydro cyclosporin A, dihydro cyclosporin C, acetyl cyclosporin A, PSC-833, (Me-Ile-4)-cyclosporin (SDZ-NIM 811) (both from Sandoz Pharmaceutical Corp.), and related oligopeptides produced by species in the genus Topycladium); antifungals including but not limited to ketoconazole; cardiovascular drug including but not limited to MS-209 (BASF), amiodarone, nifedipine, reserpine, quinidine, nicardipine, ethacrynic acid, propafenone, reserpine, amiloride; anti-migraine natural products including but not limited to ergot alkaloids; antibiotics including but not limited to cefoperazone, tetracycline, chloroquine, fosfomycin; antiparasitics including but not limited to ivermectin; multi-drug resistance reversers including but not limited to VX-710 and VX-853 (Vertex Pharmaceutical Incorporated); tyrosine kinase inhibitors including but not limited to genistein and related isoflavonoids, quercetin; protein kinase C inhibitors including but not limited to calphostin; apoptosis inducers including but not limited to ceramides; and agents active against endorphin receptors including but not limited to morphine, morphine congeners, other opioids and opioid antagonists including (but not limited to) naloxone, naltrexone and nalmefene).

[0258] The agents described herein can be fused to a modified version of the blood serum protein transferrin. U.S. 20030221201, U.S. 20040023334, U.S. 20030226155, WO 04/020454, and WO 04/019872 discuss the manufacture and use of transferrin fusion proteins. Transferrin fusion proteins may improve circulatory half life and efficacy, decrease undesirable side effects and allow reduced dosage.

[0259] The peptides and agonists described herein can be recombinantly expressed in bacteria. Bacteria expressing the peptide or agonists can be administered orally, rectally, mucosally or in via some other mode of administration including but not limited to those described herein. Bacterial hosts suitable for such administration include but are not limited to certain Lactobacteria (e.g. Lactococcus lactis, Lactobacillus plantarum, Lact. rhamnosus and Lact. paracasei ssp. Paracasie and other species found in normal human flora (Ahrne et al. Journal of Applied Microbiology 1998 85:88)), certain Streptococcus sp. (e.g. S. gordonii), and certain B. subtilis strains (including pSM539 described in Porzio et al. BMC Biotechnology 2004 4:27). The peptides and agonists described herein can be administered using the Heliobacter based preparation methods described in WO06/015445.

### Dosage

[0260] The dose range for adult humans is generally from 0.005 mg to 10 g/day orally. Tablets or other forms of presentation provided in discrete units may conveniently contain an amount of compound described herein which is effective at such dosage or as a multiple of the same, for instance, units containing 5 mg to 500 mg, usually around 10 mg to 200 mg. The precise amount of compound administered to a patient will be the responsibility of the attendant physician. However, the dose employed will depend on a number of factors, including the age and sex of the patient, the precise disorder being treated, and its severity.

[0261] A dosage unit (e.g. an oral dosage unit) can include from, for example, 1 to 30 μg, 1 to 40 μg, 1 to 50 μg, 1 to 100 μg, 1 to 200 μg, 1 to 300 μg, 1 to 400 μg, 1 to 500 μg, 1 to 600 μg, 1 to 700 μg, 1 to 800 μg, 1 to 900 μg, 1 to 1000 μg, 10 to 30 μg, 10 to 40 μg, 10 to 50 μg, 10 to 100 μg, 10 to 200 μg, 10 to 300 μg, 10 to 400 μg, 10 to 500 μg, 10 to 600 μg, 10 to 700 μg, 10 to 800 μg, 10 to 900 μg, 10 to 1000 μg, 100 to 200 μg, 100 to 300 μg, 100 to 400 μg, 100 to 500 μg, 100 to 600 μg, 100 to 700 μg, 100 to 800 μg, 100 to 900 μg, 100 to 1000 μg, 100 to 1250 μg, 100 to 1500 μg, 100 to 1750 μg, 100 to 2000 μg, 100 to 2250 μg, 100 to 2500 μg, 100 to 2750 μg, 100 to 3000 μg, 200 to 300 μg, 200 to 400 μg, 200 to 500 μg, 200 to 600 μg, 200 to 700 μg, 200 to 800 μg, 200 to 900 μg, 200 to 1000 μg, 200 to 1250 μg, 200 to 1500 μg, 200 to 1750 μg, 200 to 2000 μg, 200 to 2250 μg, 200 to 2500 μg, 200 to 2750 μg, 200 to 3000 μg, 300 to 400 μg, 300 to 500 μg, 300 to 600 μg, 300 to 700 μg, 300 to 800 μg, 300 to 900 μg, 300 to 1000 μg, 300 to 1250 μg, 300 to 1500 μg, 300 to 1750 μg, 300 to 2000 μg, 300 to 2250 μg, 300 to 2500 μg, 300 to 2750 μg, 300 to 3000 μg, 400 to 500 μg, 400 to 600 μg, 400 to 700 μg, 400 to 800 μg, 400 to 900 μg, 400 to 1000 μg, 400 to 1250 μg, 400 to 1500 μg, 400 to 1750 μg, 400 to 2000 μg, 400 to 2250 μg, 400 to 2500 μg, 400 to 2750 μg, 400 to 3000 μg, 500 to 600 μg, 500 to 700 μg, 500 to 800 μg, 500 to 900 μg, 500 to 1000 μg, 500 to 1250 μg, 500 to 1500 μg, 500 to 1750 μg, 500 to 2000 μg, 500 to 2250 μg, 500 to 2500 μg, 500 to 2750 μg, 500 to 3000 μg, 600 to 700 μg, 600 to 800 μg, 600 to 900 μg, 600 to 1000 μg, 600 to 1250 μg, 600 to 1500 μg, 600 to 1750 μg, 600 to 2000 μg, 600 to 2250 μg, 600 to 2500 μg, 600 to 2750 μg, 600 to 3000 μg, 700 to 800 μg, 700 to 900 μg, 700 to 1000 μg, 700 to 1250 μg, 700 to 1500 μg, 700 to 1750 μg, 700 to 2000 μg, 700 to 2250 μg, 700 to 2500 μg, 700 to 2750 μg, 700 to 3000 μg, 800 to 900 μg, 800 to 1000 μg, 800 to 1250 μg, 800 to 1500 μg, 800 to 1750 μg, 800 to 2000 μg, 800 to 2250 μg, 800 to 2500 μg, 800 to 2750 μg, 800 to 3000 μg, 900 to 1000 μg, 900 to 1250 μg, 900 to 1500 μg, 900 to 1750 μg, 900 to 2000 μg, 900 to 2250 μg, 900 to 2500 μg, 900 to 2750 μg, 900 to 3000 μg, 1000 to 1250 μg, 1000 to 1500 μg, 1000 to 1750 μg, 1000 to 2000 μg, 1000 to 2250 μg, 1000 to 2500 μg, 1000 to 2750 μg, 1000 to 3000 μg, 2 to 500 μg, 50 to 500 μg, 3 to 100 μg, 5 to 20 μg, 5 to 100 μg, 10 μg, 20 μg, 30 μg, 40 μg, 50 μg, 60 μg, 70 μg, 75 μg, 80 μg, 90 μg, 100 μg, 150 μg, 200 μg, 250 μg, 300 μg, 350 μg, 400 μg, 450 μg, 500 μg, 550 μg, 600 μg, 650 μg, 700 μg, 750 μg, 800 μg, 850 μg, 900 μg, 950 μg, 1000 μg, 1050 μg, 1100 μg, 1150 μg, 1200 μg, 1250 μg, 1300 μg, 1350 μg, 1400 μg, 1450 μg, 1500 μg, 1550 μg, 1600 μg, 1650 μg, 1700 μg, 1750 μg, 1800 μg, 1850 μg, 1900 μg, 1950 μg, 2000 μg, 2050 μg, 2100 μg, 2150 μg, 2200 μg, 2250 μg, 2300 μg, 2350 μg, 2400 μg, 2450 μg, 2500 μg, 2550 μg, 2600 μg, 2650 μg, 2700 μg, 2750 μg, 2800 μg, 2850 μg, 2900 μg, 2950 μg, 3000 μg, 3250 μg, 3500 μg, 3750 μg, 4000 μg, 4250 μg, 4500 μg, 4750 μg, 5000 μg of a peptide or agonist described herein. In various embodiments, the dosage unit is administered with food at anytime of the day, without food at anytime of the day, with food after an overnight fast (e.g. with breakfast), at bedtime after a low fat snack. In various embodiments, the dosage unit is administered once a day, twice a day, three times a day, four times a day, five times a day, six times a day. The dosage unit can optionally comprise other agents.

[0262] A dosage unit (e.g. an oral dosage unit) can include, for example, from 1 to 30 μg, 1 to 40 μg, 1 to 50 μg, 1 to 100 μg, 1 to 200 μg, 1 to 300 μg, 1 to 400 μg, 1 to 500 μg, 1 to 600 μg, 1 to 700 μg, 1 to 800 μg, 1 to 900 μg, 1 to 1000 μg, 10 to 30 μg, 10 to 40 μg, 10 to 50 μg, 10 to 100 μg, 10 to 200 μg, 10 to 300 μg, 10 to 400 μg, 10 to 500 μg, 10 to 600 μg, 10 to 700 μg, 10 to 800 μg, 10 to 900 μg, 10 to 1000 μg, 100 to 200 μg, 100 to 300 μg, 100 to 400 μg, 100 to 500 μg, 100 to 600 μg, 100 to 700 μg, 100 to 800 μg, 100 to 900 μg, 100 to 1000 μg, 100 to 1250 μg, 100 to 1500 μg, 100 to 1750 μg, 100 to 2000 μg, 100 to 2250 μg, 100 to 2500 μg, 100 to 2750 μg, 100 to 3000 μg, 200 to 300 μg, 200 to 400 μg, 200 to 500 μg, 200 to 600 μg, 200 to 700 μg, 200 to 800 μg, 200 to 900 μg, 200 to 1000 μg, 200 to 1250 μg, 200 to 1500 μg, 200 to 1750 μg, 200 to 2000 μg, 200 to 2250 μg, 200 to 2500 μg, 200 to 2750 μg, 200 to 3000 μg, 300 to 400 μg, 300 to 500 μg, 300 to 600 μg, 300 to 700 μg, 300 to 800 μg, 300 to 900 μg, 300 to 1000 μg, 300 to 1250 μg, 300 to 1500 μg, 300 to 1750 μg, 300 to 2000 μg, 300 to 2250 μg, 300 to 2500 μg, 300 to 2750 μg, 300 to 3000 μg, 400 to 500 μg, 400 to 600 μg, 400 to 700 μg, 400 to 800 μg, 400 to 900 μg, 400 to 1000 μg, 400 to 1250 μg, 400 to 1500 μg, 400 to 1750 μg, 400 to 2000 μg, 400 to 2250 μg, 400 to 2500 μg, 400 to 2750 μg, 400 to 3000 μg, 500 to 600 μg, 500 to 700 μg, 500 to 800 μg, 500 to 900 μg, 500 to 1000 μg, 500 to 1250 μg, 500 to 1500 μg, 500 to 1750 μg, 500 to 2000 μg, 500 to 2250 μg, 500 to 2500 μg, 500 to 2750 μg, 500 to 3000 μg, 600 to 700 μg, 600 to 800 μg, 600 to 900 μg, 600 to 1000 μg, 600 to 1250 μg, 600 to 1500 μg, 600 to 1750 μg, 600 to 2000 μg, 600 to 2250 μg, 600 to 2500 μg, 600 to 2750 μg, 600 to 3000 μg, 700 to 800 μg, 700 to 900 μg, 700 to 1000 μg, 700 to 1250 μg, 700 to 1500 μg, 700 to 1750 μg, 700 to 2000 μg, 700 to 2250 μg, 700 to 2500 μg, 700 to 2750 μg, 700 to 3000 μg, 800 to 900 μg, 800 to 1000 μg, 800 to 1250 μg, 800 to 1500 μg, 800 to 1750 μg, 800 to 2000 μg, 800 to 2250 μg, 800 to 2500 μg, 800 to 2750 μg, 800 to 3000 μg, 900 to 1000 μg, 900 to 1250 μg, 900 to 1500 μg, 900 to 1750 μg, 900 to 2000 μg, 900 to 2250 μg, 900 to 2500 μg, 900 to 2750 μg, 900 to 3000 μg, 1000 to 1250 μg, 1000 to 1500 μg, 1000 to 1750 μg, 1000 to 2000 μg, 1000 to 2250 μg, 1000 to 2500 μg, 1000 to 2750 μg, 1000 to 3000 μg, 2 to 500 μg, 50 to 500 μg, 3 to 100 μg, 5 to 20 μg, 5 to 100 μg, 10 μg, 20 μg, 30 μg, 40 μg, 50 μg, 60 μg, 70 μg, 75 μg, 80 μg, 90 μg, 100 μg, 150 μg, 200 μg, 250 μg, 300 μg, 350 μg, 400 μg, 450 μg, 500 μg, 550 μg, 600 μg, 650 μg, 700 μg, 750 μg, 800 μg, 850 μg, 900 μg, 950 μg, 1000 μg, 1050 μg, 1100 μg, 1150 μg, 1200 μg, 1250 μg, 1300 μg, 1350 μg, 1400 μg, 1450 μg, 1500 μg, 1550 μg, 1600 μg, 1650 μg, 1700 μg, 1750 μg, 1800 μg, 1850 μg, 1900 μg, 1950 μg, 2000 μg, 2050 μg, 2100 μg, 2150 μg, 2200 μg, 2250 μg, 2300 μg, 2350 μg, 2400 μg, 2450 μg, 2500 μg, 2550 μg, 2600 μg, 2650 μg, 2700 μg, 2750 μg, 2800 μg, 2850 μg, 2900 μg, 2950 μg, 3000 μg, 3250 μg, 3500 μg, 3750 μg, 4000 μg, 4250 μg, 4500 μg, 4750 μg, 5000 μg of a peptide or agonist described herein and from 10 mg to 600 mg (e.g. 10 mg, 20 mg, 30 mg, 40 mg, 50 mg, 60 mg, 70 mg, 80 mg, 90 mg, 100 mg, 120 mg, 140 mg, 160 mg, 180 mg, 200 mg, 220 mg, 240 mg, 260 mg, 280 mg, 300 mg, 320 mg, 340 mg, 360 mg, 380 mg, 400 mg, 420 mg, 440 mg, 460 mg, 480 mg, 500 mg, 520 mg, 540 mg, 560 mg, 580 mg, 600 mg) of furosemide (Lasix).

[0263] A dosage unit (e.g. an oral, intravenous or intramuscular dosage unit) can include, for example, from 1 to 30 μg, 1 to 40 μg, 1 to 50 μg, 1 to 100 μg, 1 to 200 μg, 1 to 300 μg, 1 to 400 μg, 1 to 500 μg, 1 to 600 μg, 1 to 700 μg, 1 to 800 μg, 1 to 900 μg, 1 to 1000 μg, 10 to 30 μg, 10 to 40 μg, 10 to 50 μg, 10 to 100 μg, 10 to 200 μg, 10 to 300 μg, 10 to 400 μg, 10 to 500 μg, 10 to 600 μg, 10 to 700 μg, 10 to 800 μg, 10 to 900 μg, 10 to 1000 μg, 100 to 200 μg, 100 to 300 μg, 100 to 400 μg, 100 to 500 μg, 100 to 600 μg, 100 to 700 μg, 100 to 800 μg, 100 to 900 μg, 100 to 1000 μg, 100 to 1250 μg, 100 to 1500 μg, 100 to 1750 μg, 100 to 2000 μg, 100 to 2250 μg, 100 to 2500 μg, 100 to 2750 μg, 100 to 3000 μg, 200 to 300 μg, 200 to 400 μg, 200 to 500 μg, 200 to 600 μg, 200 to 700 μg, 200 to 800 μg, 200 to 900 μg, 200 to 1000 μg, 200 to 1250 μg, 200 to 1500 μg, 200 to 1750 μg, 200 to 2000 μg, 200 to 2250 μg, 200 to 2500 μg, 200 to 2750 μg, 200 to 3000 μg, 300 to 400 μg, 300 to 500 μg, 300 to 600 μg, 300 to 700 μg, 300 to 800 μg, 300 to 900 μg, 300 to 1000 μg, 300 to 1250 μg, 300 to 1500 μg, 300 to 1750 μg, 300 to 2000 μg, 300 to 2250 μg, 300 to 2500 μg, 300 to 2750 μg, 300 to 3000 μg, 400 to 500 μg, 400 to 600 μg, 400 to 700 μg, 400 to 800 μg, 400 to 900 μg, 400 to 1000 μg, 400 to 1250 μg, 400 to 1500 μg, 400 to 1750 μg, 400 to 2000 μg, 400 to 2250 μg, 400 to 2500 μg, 400 to 2750 μg, 400 to 3000 μg, 500 to 600 μg, 500 to 700 μg, 500 to 800 μg, 500 to 900 μg, 500 to 1000 μg, 500 to 1250 μg, 500 to 1500 μg, 500 to 1750 μg, 500 to 2000 μg, 500 to 2250 μg, 500 to 2500 μg, 500 to 2750 μg, 500 to 3000 μg, 600 to 700 μg, 600 to 800 μg, 600 to 900 μg, 600 to 1000 μg, 600 to 1250 μg, 600 to 1500 μg, 600 to 1750 μg, 600 to 2000 μg, 600 to 2250 μg, 600 to 2500 μg, 600 to 2750 μg, 600 to 3000 μg, 700 to 800 μg, 700 to 900 μg, 700 to 1000 μg, 700 to 1250 μg, 700 to 1500 μg, 700 to 1750 μg, 700 to 2000 μg, 700 to 2250 μg, 700 to 2500 μg, 700 to 2750 μg, 700 to 3000 μg, 800 to 900 μg, 800 to 1000 μg, 800 to 1250 μg, 800 to 1500 μg, 800 to 1750 μg, 800 to 2000 μg, 800 to 2250 μg, 800 to 2500 μg, 800 to 2750 μg, 800 to 3000 μg, 900 to 1000 μg, 900 to 1250 μg, 900 to 1500 μg, 900 to 1750 μg, 900 to 2000 μg, 900 to 2250 μg, 900 to 2500 μg, 900 to 2750 μg, 900 to 3000 μg, 1000 to 1250 μg, 1000 to 1500 μg, 1000 to 1750 μg, 1000 to 2000 μg, 1000 to 2250 μg, 1000 to 2500 μg, 1000 to 2750 μg, 1000 to 3000 μg, 2 to 500 μg, 50 to 500 μg, 3 to 100 μg, 5 to 20 μg, 5 to 100 μg, 10 μg, 20 μg, 30 μg, 40 μg, 50 μg, 60 μg, 70 μg, 75 μg, 80 μg, 90 μg, 100 μg, 150 μg, 200 μg, 250 μg, 300 μg, 350 μg, 400 μg, 450 μg, 500 μg, 550 μg, 600 μg, 650 μg, 700 μg, 750 μg, 800 μg, 850 μg, 900 μg, 950 μg, 1000 μg, 1050 μg, 1100 μg, 1150 μg, 1200 μg, 1250 μg, 1300 μg, 1350 μg, 1400 μg, 1450 μg, 1500 μg, 1550 μg, 1600 μg, 1650 μg, 1700 μg, 1750 μg, 1800 μg, 1850 μg, 1900 μg, 1950 μg, 2000 μg, 2050 μg, 2100 μg, 2150 μg, 2200 μg, 2250 μg, 2300 μg, 2350 μg, 2400 μg, 2450 μg, 2500 μg, 2550 μg, 2600 μg, 2650 μg, 2700 μg, 2750 μg, 2800 μg, 2850 μg, 2900 μg, 2950 μg, 3000 μg, 3250 μg, 3500 μg, 3750 μg, 4000 μg, 4250 μg, 4500 μg, 4750 μg, 5000 μg of a peptide or agonist described herein and from 0.2 mg to 10 mg (e.g. 0.2 mg, 0.4 mg, 0.5 mg, 0.75 mg, 1 mg, 1.5 mg, 2 mg, 2.5 mg, 3 mg, 3.5 mg, 4 mg, 4.5 mg, 5 mg, 5.5 mg, 6 mg, 6.5 mg, 7 mg, 7.5 mg, 8 mg, 8.5 mg, 9 mg, 9.5 mg, 10 mg) of bumetanide (Bumex®).

[0264] The precise amount of each of the two or more active ingredients in a dosage unit will depend on the desired dosage of each component. Thus, it can be useful to create a dosage unit that will, when administered according to a particular dosage schedule (e.g., a dosage schedule specifying a certain number of units and a particular timing for administration), deliver the same dosage of each component as would be administered if the patient was being treated with only a single component. In other circumstances, it might be desirable to create a dosage unit that will deliver a dosage of one or more components that is less than that which would be administered if the patient was being treated only with a single component. Finally, it might be desirable to create a dosage unit that will deliver a dosage of one or more components that is greater than that which would be administered if the patient was being treated only with a single component. The pharmaceutical composition can include additional ingredients including but not limited to the excipients described herein. In certain embodiments, one or more therapeutic agents of the dosage unit may exist in an extended or control release formulation and additional therapeutic agents may not exist in extended release formulation. For example, a peptide or agonist described herein may exist in a controlled release formulation or extended release formulation in the same dosage unit with another agent that may or may not be in either a controlled release or extended release formulation. Thus, in certain embodiments, it may be desirable to provide for the immediate release of one or more of the agents described herein, and the controlled release of one or more other agents.

[0265] In certain embodiments the dosage unit and daily dose are equivalent. In certain embodiments the dosage unit and the daily dose are not equivalent. In various embodiments, the dosage unit is administered twenty minutes prior to food consumption, twenty minutes after food consumption, with food at anytime of the day, without food at anytime of the day, with food after an overnight fast (e.g. with breakfast), at bedtime after a low fat snack. In various embodiments, the dosage unit is administered once a day, twice a day, three times a day, four times a day, five times a day, six times a day.

[0266] When two or more active ingredients are combined in single dosage form, chemical interactions between the active ingredients may occur. For example, acidic and basic active ingredients can react with each other and acidic active ingredients can facilitate the degradation of acid labile substances. Thus, in certain dosage forms, acidic and basic substances can be physically separated as two distinct or isolated layers in a compressed tablet, or in the core and shell of a press-coated tablet. Additional agents that are compatible with acidic as well as basic substances, have the flexibility of being placed in either layer. In certain multiple layer compositions at least one active ingredient can be enteric-coated. In certain embodiments thereof at least one active ingredient can be presented in a controlled release form. In certain embodiments where a combination of three or more active substances are used, they can be presented as physically isolated segments of a compressed multilayer tablet, which can be optionally film coated.

[0267] The therapeutic combinations described herein can be formulated as a tablet or capsule comprising a plurality of beads, granules, or pellets. All active ingredients including the vitamins of the combination are formulated into granules or beads or pellets that are further coated with a protective coat, an enteric coat, or a film coat to avoid the possible chemical interactions. Granulation and coating of granules or beads is done using techniques well known to a person skilled in the art. At least one active ingredient can present in a controlled release form. Finally these coated granules or beads are filled into hard gelatin capsules or compressed to form tablets.

[0268] The therapeutic combinations described herein can be formulated as a capsule comprising microtablets or minitablets of all active ingredients. Microtablets of the individual agents can be prepared using well known pharmaceutical procedures of tablet making like direct compression, dry granulation or wet granulation. Individual microtablets can be filled into hard gelatin capsules. A final dosage form may comprise one or more microtablets of each individual component. The microtablets may be film coated or enteric coated.

[0269] The therapeutic combinations described herein can be formulated as a capsule comprising one or more microtablets and powder, or one or more microtablets and granules or beads. In order to avoid interactions between drugs, some active ingredients of a said combination can be formulated as microtablets and the others filled into capsules as a powder, granules, or beads. The microtablets may be film coated or enteric coated. At least one active ingredient can be presented in controlled release form.

[0270] The therapeutic combinations described herein can be formulated wherein the active ingredients are distributed in the inner and outer phase of tablets. In an attempt to divide chemically incompatible components of proposed combination, few interacting components are converted in granules or beads using well known pharmaceutical procedures in prior art. The prepared granules or beads (inner phase) are then mixed with outer phase comprising the remaining active ingredients and at least one pharmaceutically acceptable excipient. The mixture thus comprising inner and outer phase is compressed into tablets or molded into tablets. The granules or beads can be controlled release or immediate release beads or granules, and can further be coated using an enteric polymer in an aqueous or non-aqueous system, using methods and materials that are known in the art.

[0271] The therapeutic combinations described herein can be formulated as single dosage unit comprising suitable buffering agent. All powdered ingredients of said combination are mixed and a suitable quantity of one or more buffering agents is added to the blend to minimize possible interactions.

[0272] The agents described herein, alone or in combination, can be combined with any pharmaceutically acceptable carrier or medium. Thus, they can be combined with materials that do not produce an adverse, allergic or otherwise unwanted reaction when administered to a patient. The carriers or mediums used can include solvents, dispersants, coatings, absorption promoting agents, controlled release agents, and one or more inert excipients (which include starches, polyols, granulating agents, microcrystalline cellulose, diluents, lubricants, binders, disintegrating agents, and the like), etc. If desired, tablet dosages of the disclosed compositions may be coated by standard aqueous or nonaqueous techniques.

### Treatment of the Side-Effects of Opioid Administration

[0273] GGC receptor agonists, e.g., GCC receptor agonist peptides described herein, may useful in the treatment of one or more side effects of opioid administration, e.g., opioid induced constipation, nausea and/or vomiting. In the case of constipation, the GCC receptor agonist peptide can be administered at a dosage to induce laxation within a desired time (e.g., within 15 minutes, 30 minutes, 1 hour, 2 hours, 3 hours, 4 hours, 5 hours, 6 hours, 7 hours, 8 hours, 9 hours, 10 hours, 12 hours, 18 hours or 24 hours).

[0274] The GCC receptor agonist peptide can be administered to maintain regular bowel movements in a patient who is a chronic opioid user (e.g., a terminally-ill patient). The administration can be via any convenient route (e.g., sublingual, parenteral, intravenous, subcutaneous).

[0275] Thus, the peptides described herein can be administered to a patient that is taking one or more of the following opioids: Acetorphine, Acetyldihydrocodeine, Acetylmorphone, Alfentanil, Allylprodine, Anileridine, Bemidone, Benzylmorphine, Bezitramide, Buprenorphine, Butorphanol, Carfentanil/Carfentanyl, Clonitazene, Codeine, Codeine-N-Oxide, Codeinone, Cyclazocine, Cyclorphan, Desomorphine, Dextromoramide, Dextropropoxyphene, Dezocine, Diacetyldihydromorphine, Diamorphine/Diacetylmorphine (Heroin), Diethylthiambutene, Difenoxin, Dihydrocodeine, Dihydrocodeinone Enol Acetate, Dihydroetorphine, Dihydroisocodeine, Dihydromorphine, Dimethylthiambutene, Diphenoxylate, Dipropanoylmorphine, Drobetabol, Ethylketocyclazocine, Ethylmorphine, Etonitazene, Etorphine, Fentanyl, Hydrocodone, Hydromorphone, Isomethadone, Ketobemidone, Laudanum, Lefetamine, Levallorphan, Levo-Alphacetylmethadol (LAAM), Levomethorphan, Levorphanol, Loperamide, Meptazinol, Metazocine, Methadone, Monoacetylmorphine, Morphine, Morphine-6-Glucuronide, Morphine-N-Oxide, Morphinone, MPPP (1-Methyl 4-Phenyl 4-Propionoxypiperidine), Myorphine, Nalbuphine/Nalbufine, Nicocodeine, Nicodicodeine, Nicomorphine, Norcodeine, Ohmefentanyl, Oxycodone, Oxymorphone, Pentazocine, PEPAP (1-Phenethyl-4-Phenyl-4-Piperidinol Acetate (Ester)), Pethidine (Meperidine), Phenadoxone, Phenazocine, Phenoperidine, Pholcodeine, Piminodine, Piritramide, Prodine, Propiram, Propoxyphene, Racemethorphan, Remifentanil, Sufentanil, Thebaine, Thiofentanil/Thiofentanyl, Tilidine, and Tramadol. The peptide can be co-administered with or co-formulated with any of the preceeding peptides.

[0276] Where the GCC receptor agonist is co-formulated with an opioid the composition may further include one or more other active ingredients that may be conventionally employed in analgesic and/or cough-cold-antitussive combination products. Such conventional ingredients include, for example, aspirin, acetaminophen, phenylpropanolamine, phenylephrine, chlorpheniramine, caffeine, and/or guaifenesin. Typical or conventional ingredients that may be included in the opioid component are described, for example, in the Physicians' Desk Reference, 1999, the disclosures of which are hereby incorporated herein by reference, in their entirety.

[0277] In addition, the composition may further include one or more compounds that may be designed to enhance the analgesic potency of the opioid and/or to reduce analgesic tolerance development. Such compounds include, for example, dextromethorphan or other NMDA antagonists (Mao, M. J. et al., Pain 1996, 67, 361), L-364,718 and other CCK antagonists (Dourish, C. T. et al., Eur J Pharmacol 1988, 147, 469), NOS inhibitors (Bhargava, H. N. et al., Neuropeptides 1996, 30, 219), PKC inhibitors (Bilsky, E. J. et al., J Pharmacol Exp Ther 1996, 277, 484), and dynorphin antagonists or antisera (Nichols, M. L. et al., Pain 1997, 69, 317). The disclosures of each of the foregoing documents are hereby incorporated herein by reference, in their entireties.

[0278] The combination products, such as pharmaceutical compositions comprising opioids in combination with a GCC agonist may be in any dosage form, such as those described herein, and can also be administered in various ways, as described herein. In a preferred embodiment, the combination products of the disclosure are formulated together, in a single dosage form (that is, combined together in one capsule, tablet, powder, or liquid, etc.). When the combination products are not formulated together in a single dosage form, the opioid compounds and the GCC agonists may be administered at the same time (that is, together), or in any order. When not administered at the same time, preferably the administration of an opioid and a GCC agonist occurs less than about one hour apart, less than about 30 minutes apart, less than about 15 minutes apart, and less than about 5 minutes apart. Administration of the combination of an opioid and a GCC agonist can be, for example, oral, although other routes of administration, as described above, are contemplated to be within the scope of the present disclosure. Although it is the opioids and GCC agonists may both be administered in the same fashion (that is, for example, both orally), if desired, they may each be administered in different fashions (that is, for example, one component of the combination product may be administered orally, and another component may be administered intravenously). The dosage of the combination products of the disclosure may vary depending upon various factors such as the pharmacodynamic characteristics of the particular agent and its mode and route of administration, the age, health and weight of the recipient, the nature and extent of the symptoms, the kind of concurrent treatment, the frequency of treatment, and the effect desired.

[0279] Although the proper dosage of the combination products of this disclosure will be readily ascertainable by one skilled in the art, by way of general guidance, where an opioid compounds is combined with a GCC agonist, for example, typically a daily dosage may range from about 0.01 to about 100 milligrams, 0.1 to about 10 milligrams of the opioid, 15 to about 200 milligrams, 1, 2, 3, 4, 5, 6, 7, 8, 9, 10 milligrams of opioid per kilogram of patient body weight. The opioid-GCC agonist combination product can include, for example, from 1 to 30 μg, 1 to 40 μg, 1 to 50 μg, 1 to 100 μg, 1 to 200 μg, 1 to 300 μg, 1 to 400 μg, 1 to 500 μg, 1 to 600 μg, 1 to 700 μg, 1 to 800 μg, 1 to 900 μg, 1 to 1000 μg, 10 to 30 μg, 10 to 40 μg, 10 to 50 μg, 10 to 100 μg, 10 to 200 μg, 10 to 300 μg, 10 to 400 μg, 10 to 500 μg, 10 to 600 μg, 10 to 700 μg, 10 to 800 μg, 10 to 900 μg, 10 to 1000 μg, 100 to 200 μg, 100 to 300 μg, 100 to 400 μg, 100 to 500 μg, 100 to 600 μg, 100 to 700 μg, 100 to 800 μg, 100 to 900 μg, 100 to 1000 μg, 100 to 1250 μg, 100 to 1500 μg, 100 to 1750 μg, 100 to 2000 μg, 100 to 2250 μg, 100 to 2500 μg, 100 to 2750 μg, 100 to 3000 μg, 200 to 300 μg, 200 to 400 μg, 200 to 500 μg, 200 to 600 μg, 200 to 700 μg, 200 to 800 μg, 200 to 900 μg, 200 to 1000 μg, 200 to 1250 μg, 200 to 1500 μg, 200 to 1750 μg, 200 to 2000 μg, 200 to 2250 μg, 200 to 2500 μg, 200 to 2750 μg, 200 to 3000 μg, 300 to 400 μg, 300 to 500 μg, 300 to 600 μg, 300 to 700 μg, 300 to 800 μg, 300 to 900 μg, 300 to 1000 μg, 300 to 1250 μg, 300 to 1500 μg, 300 to 1750 μg, 300 to 2000 μg, 300 to 2250 μg, 300 to 2500 μg, 300 to 2750 μg, 300 to 3000 μg, 400 to 500 μg, 400 to 600 μg, 400 to 700 μg, 400 to 800 μg, 400 to 900 μg, 400 to 1000 μg, 400 to 1250 μg, 400 to 1500 μg, 400 to 1750 μg, 400 to 2000 μg, 400 to 2250 μg, 400 to 2500 μg, 400 to 2750 μg, 400 to 3000 μg, 500 to 600 μg, 500 to 700 μg, 500 to 800 μg, 500 to 900 μg, 500 to 1000 μg, 500 to 1250 μg, 500 to 1500 μg, 500 to 1750 μg, 500 to 2000 μg, 500 to 2250 μg, 500 to 2500 μg, 500 to 2750 μg, 500 to 3000 μg, 600 to 700 μg, 600 to 800 μg, 600 to 900 μg, 600 to 1000 μg, 600 to 1250 μg, 600 to 1500 μg, 600 to 1750 μg, 600 to 2000 μg, 600 to 2250 μg, 600 to 2500 μg, 600 to 2750 μg, 600 to 3000 μg, 700 to 800 μg, 700 to 900 μg, 700 to 1000 μg, 700 to 1250 μg, 700 to 1500 μg, 700 to 1750 μg, 700 to 2000 μg, 700 to 2250 μg, 700 to 2500 μg, 700 to 2750 μg, 700 to 3000 μg, 800 to 900 μg, 800 to 1000 μg, 800 to 1250 μg, 800 to 1500 μg, 800 to 1750 μg, 800 to 2000 μg, 800 to 2250 μg, 800 to 2500 μg, 800 to 2750 μg, 800 to 3000 μg, 900 to 1000 μg, 900 to 1250 μg, 900 to 1500 μg, 900 to 1750 μg, 900 to 2000 μg, 900 to 2250 μg, 900 to 2500 μg, 900 to 2750 μg, 900 to 3000 μg, 1000 to 1250 μg, 1000 to 1500 μg, 1000 to 1750 μg, 1000 to 2000 μg, 1000 to 2250 μg, 1000 to 2500 μg, 1000 to 2750 μg, 1000 to 3000 μg, 2 to 500 μg, 50 to 500 μg, 3 to 100 μg, 5 to 20 μg, 5 to 100 μg, 10 μg, 20 μg, 30 μg, 40 μg, 50 μg, 60 μg, 70 μg, 75 μg, 80 μg, 90 μg, 100 μg, 150 μg, 200 μg, 250 μg, 300 μg, 350 μg, 400 μg, 450 μg, 500 μg, 550 μg, 600 μg, 650 μg, 700 μg, 750 μg, 800 μg, 850 μg, 900 μg, 950 μg, 1000 μg, 1050 μg, 1100 μg, 1150 μg, 1200 μg, 1250 μg, 1300 μg, 1350 μg, 1400 μg, 1450 μg, 1500 μg, 1550 μg, 1600 μg, 1650 μg, 1700 μg, 1750 μg, 1800 μg, 1850 μg, 1900 μg, 1950 μg, 2000 μg, 2050 μg, 2100 μg, 2150 μg, 2200 μg, 2250 μg, 2300 μg, 2350 μg, 2400 μg, 2450 μg, 2500 μg, 2550 μg, 2600 μg, 2650 μg, 2700 μg, 2750 μg, 2800 μg, 2850 μg, 2900 μg, 2950 μg, 3000 μg, 3250 μg, 3500 μg, 3750 μg, 4000 μg, 4250 μg, 4500 μg, 4750 μg, 5000 μg of a GCC agonist described herein.

[0280] When provided as a single dosage form, the potential exists for a chemical interaction between the combined active ingredients (for example, an opioid and a GCC agonist). For this reason, the preferred dosage forms of the combination products of this disclosure are formulated such that although the active ingredients are combined in a single dosage form, the physical contact between the active ingredients is minimized (that is, reduced).

[0281] In order to minimize contact, one embodiment of this disclosure where the product is orally administered provides for a combination product wherein one active ingredient is enteric coated. By enteric coating one or more of the active ingredients, it is possible not only to minimize the contact between the combined active ingredients, but also, it is possible to control the release of one of these components in the gastrointestinal tract such that one of these components is not released in the stomach but rather is released in the intestines. Another embodiment of this disclosure where oral administration is desired provides for a combination product wherein one of the active ingredients is coated with a sustained-release material which effects a sustained-release throughout the gastrointestinal tract and also serves to minimize physical contact between the combined active ingredients. Furthermore, the sustained-released component can be additionally enteric coated such that the release of this component occurs only in the intestine. Still another approach would involve the formulation of a combination product in which the one component is coated with a sustained and/or enteric release polymer, and the other component is also coated with a polymer such as a low-viscosity grade of hydroxypropyl methylcellulose (HPMC) or other appropriate materials as known in the art, in order to further separate the active components. The polymer coating serves to form an additional barrier to interaction with the other component.

[0282] Dosage forms of the combination products include those wherein one active ingredient is enteric coated can be in the form of tablets such that the enteric coated component and the other active ingredient are blended together and then compressed into a tablet or such that the enteric coated component is compressed into one tablet layer and the other active ingredient is compressed into an additional layer. Optionally, in order to further separate the two layers, one or more placebo layers may be present such that the placebo layer is between the layers of active ingredients. In addition, dosage forms of the present disclosure can be in the form of capsules wherein one active ingredient is compressed into a tablet or in the form of a plurality of microtablets, particles, granules or non-perils, which are then enteric coated. These enteric coated microtablets, particles, granules or non-perils are then placed into a capsule or compressed into a capsule along with a granulation of the other active ingredient.

[0283] These as well as other ways of minimizing contact between the components of combination products of the present disclosure, whether administered in a single dosage form or administered in separate forms but at the same time by the same manner, will be readily apparent to those skilled in the art in light of the present disclosure.

### Analgesic Agents in Combitherapy

[0284] The peptides and agonists described herein can be used in combination therapy with an analgesic agent, e.g., an analgesic compound or an analgesic peptide. These peptides and compounds can be administered with the peptides described herein (simultaneously or sequentially). They can also be optionally covalently linked or attached to an agent described herein to create therapeutic conjugates. Among the useful analgesic agents are: Ca channel blockers, 5HT receptor antagonists (for example 5HT3, 5HT4 and 5HT1 receptor antagonists), opioid receptor agonists (loperamide, fedotozine, and fentanyl), NK1 receptor antagonists, CCK receptor agonists (e.g., loxiglumide), NK1 receptor antagonists, NK3 receptor antagonists, norepinephrine-serotonin reuptake inhibitors (NSRI), vanilloid and cannabanoid receptor agonists, and sialorphin. Analgesics agents in the various classes are described in the literature.

[0285] Among the useful analgesic peptides are sialorphin-related peptides, including those comprising the amino acid sequence QHNPR (SEQ ID NO:), including: VQHNPR (SEQ ID NO:); VRQHNPR (SEQ ID NO:); VRGQHNPR (SEQ ID NO:); VRGPQHNPR (SEQ ID NO:); VRGPRQHNPR (SEQ ID NO:); VRGPRRQHNPR (SEQ ID NO:); and RQHNPR (SEQ ID NO:). Sialorphin-related peptides bind to neprilysin and inhibit neprilysin-mediated breakdown of substance P and Met-enkephalin. Thus, compounds or peptides that are inhibitors of neprilysin are useful analgesic agents which can be administered with the peptides described herein in a co-therapy or linked to the peptides described herein, e.g., by a covalent bond. Sialophin and related peptides are described in U.S. Pat. No. 6,589,750; U.S. 20030078200 A1; and WO 02/051435 A2.

[0286] Opioid receptor antagonists and agonists can be administered with the peptides described herein in co-therapy or linked to the agent described herein, e.g., by a covalent bond. For example, opioid receptor antagonists such as naloxone, naltrexone, methyl nalozone, nalmefene, cypridime, beta funaltrexamine, naloxonazine, naltrindole, and nor-binaltorphimine are thought to be useful in the treatment of IBS. It can be useful to formulate opioid antagonists of this type is a delayed and sustained release formulation such that initial release of the antagonist is in the mid to distal small intestine and/or ascending colon. Such antagonists are described in WO 01/32180 A2. Enkephalin pentapeptide (HOE825; Tyr-D-Lys-Gly-Phe-L-homoserine) is an agonist of the mu and delta opioid receptors and is thought to be useful for increasing intestinal motility (Eur. J. Pharm. 219:445, 1992), and this peptide can be used in conjunction with the peptides described herein. Also useful is trimebutine which is thought to bind to mu/delta/kappa opioid receptors and activate release of motilin and modulate the release of gastrin, vasoactive intestinal peptide, gastrin and glucagons. Kappa opioid receptor agonists such as fedotozine, asimadoline, and ketocyclazocine, and compounds described in WO 03/097051 and WO05/007626 can be used with or linked to the peptides described herein. In addition, mu opioid receptor agonists such as morphine, diphenyloxylate, frakefamide (H-Tyr-D-Ala-Phe(F)-Phe-NH₂; WO 01/019849 A1) and loperamide can be used.

[0287] Tyr-Arg (kyotorphin) is a dipeptide that acts by stimulating the release of met-enkephalins to elicit an analgesic effect (J. Biol. Chem. 262:8165, 1987). Kyotorphin can be used with or linked to the peptides described herein.

[0288] Chromogranin-derived peptide (CgA 47-66; see, e.g., Ghia et al. 2004 Regulatory Peptides 119:199) can be used with or linked to the peptides described herein.

[0289] CCK receptor agonists such as caerulein from amphibians and other species are useful analgesic agents that can be used with or linked to the peptides described herein.

[0290] Conotoxin peptides represent a large class of analgesic peptides that act at voltage gated Ca channels, NMDA receptors or nicotinic receptors. These peptides can be used with or linked to the peptides described herein.

[0291] Peptide analogs of thymulin (FR Application 2830451) can have analgesic activity and can be used with or linked to the peptides described herein.

[0292] CCK (CCKa or CCKb) receptor antagonists, including loxiglumide and dexloxiglumide (the R-isomer of loxiglumide) (WO 88/05774) can have analgesic activity and can be used with or linked to the peptides described herein.

[0293] Other useful analgesic agents include 5-HT4 agonists such as tegaserod (Zelnorm®), mosapride, metoclopramide, zacopride, cisapride, renzapride, benzimidazolone derivatives such as BIMU 1 and BIMU 8, and lirexapride. Such agonists are described in: EP1321142 A1, WO 03/053432A1, EP 505322 A1, EP 505322 B1, U.S. Pat. No. 5,510,353, EP 507672 A1, EP 507672 B1, and U.S. Pat. No. 5,273,983.

[0294] Calcium channel blockers such as ziconotide and related compounds described in, for example, EP625162B1, U.S. Pat. No. 5,364,842, U.S. Pat. No. 5,587,454, U.S. Pat. No. 5,824,645, U.S. Pat. No. 5,859,186, U.S. Pat. No. 5,994,305, U.S. Pat. No. 6,087,091, U.S. Pat. No. 6,136,786, WO 93/13128 A1, EP 1336409 A1, EP 835126 A1, EP 835126 B1, U.S. Pat. No. 5,795,864, U.S. Pat. No. 5,891,849, U.S. Pat. No. 6,054,429, WO 97/01351 A1, can be used with or linked to the peptides described herein.

[0295] Various antagonists of the NK-1, NK-2, and NK-3 receptors (for a review see Giardina et al. 2003 Drugs 6:758) can be can be used with or linked to the peptides described herein.

[0296] NK1 receptor antagonists such as: aprepitant (Merck & Co Inc), vofopitant, ezlopitant (Pfizer, Inc.), R-673 (Hoffmann-La Roche Ltd), SR-48968 (Sanofi Synthelabo), CP-122,721 (Pfizer, Inc.), GW679769 (Glaxo Smith Kline), TAK-637 (Takeda/Abbot), SR-14033, and related compounds described in, for example, EP 873753 A1, US 20010006972 A1, US 20030109417 A1, WO 01/52844 A1, can be used with or linked to the peptides described herein.

[0297] NK-2 receptor antagonists such as nepadutant (Menarini Ricerche SpA), saredutant (Sanofi-Synthelabo), GW597599 (Glaxo Smith Kline), SR-144190 (Sanofi-Synthelabo) and UK-290795 (Pfizer Inc) can be used with or linked to the peptides described herein.

[0298] NK3 receptor antagonists such as osanetant (SR-142801; Sanofi-Synthelabo), SSR-241586, talnetant and related compounds described in, for example, WO 02/094187 A2, EP 876347 A1, WO 97/21680 A1, U.S. Pat. No. 6,277,862, WO 98/11090, WO 95/28418, WO 97/19927, and Boden et al. (J Med Chem. 39:1664-75, 1996) can be used with or linked to the peptides described herein.

[0299] Norepinephrine-serotonin reuptake inhibitors (NSR1) such as milnacipran and related compounds described in WO 03/077897 A1 can be used with or linked to the peptides described herein.

[0300] Vanilloid receptor antagonists such as arvanil and related compounds described in WO 01/64212 A1 can be used with or linked to the peptides described herein.

[0301] The analgesic peptides and compounds can be administered with the peptides and agonists described herein (simultaneously or sequentially). The analgesic agents can also be covalently linked to the peptides and agonists described herein to create therapeutic conjugates. Where the analgesic is a peptide and is covalently linked to an agent described herein the resulting peptide may also include at least one trypsin cleavage site. When present within the peptide, the analgesic peptide may be preceded by (if it is at the carboxy terminus) or followed by (if it is at the amino terminus) a trypsin cleavage site that allows release of the analgesic peptide.

[0302] In addition to sialorphin-related peptides, analgesic peptides include: AspPhe, endomorphin-1, endomorphin-2, nocistatin, dalargin, lupron, ziconotide, and substance P.

### Diabetes, Obesity and Other Disorders

[0303] Pharmaceutical compositions comprising at least two of: 1) an agent that stimulates the production of cAMP (e.g., glucagon-like peptide 1 (GLP-1)); 2) an agent that inhibits the degradation of a cyclic nucleotide (e.g., a phosphodiesterase inhibitor); and 3) a peptide or agonist described herein useful for treating diabetes and obesity. Such compositions may also be useful for treating secondary hyperglycemias in connection with pancreatic diseases (chronic pancreatitis, pancreasectomy, hemochromatosis) or endocrine diseases (acromegaly, Cushing's syndrome, pheochromocytoma or hyperthyreosis), drug-induced hyperglycemias (benzothiadiazine saluretics, diazoxide or glucocorticoids), pathologic glucose tolerance, hyperglycemias, dyslipoproteinemias, adiposity, hyperlipoproteinemias and/or hypotensions.

[0304] The phosphodiesterase inhibitor can be specific for a particular phosphodiesterase (e.g., Group III or Group IV) or a non-specific phosphodiesterase inhibitor, such as papaverine, theophylline, enprofyllines and/or IBMX. Specific phosphodiesterase inhibitors which inhibit group III phosphodiesterases (cGMP-inhibited phosphodiesterases), including indolidane (LY195115), cilostamide (OPC 3689), lixazinone (RS 82856), Y-590, imazodane (CI914), SKF 94120, quazinone, ICI 153,110, cilostazole, bemorandane (RWJ 22867), siguazodane (SK&F 94-836), adibendane (BM 14,478), milrinone (WIN 47203), enoximone (MDL 17043), pimobendane (UD-CG 115), MC1-154, saterinone (BDF 8634), sulmazole (ARL 115), UD-CG 212, motapizone, piroximone, and ICI 118233 can be useful. In addition, phosphodiesterase inhibitors which inhibit group IV phosphodiesterases (cAMP-specific phosphodiesterases), such as rolipram ZK 62711; pyrrolidone), imidazolidinone (RO 20-1724), etazolate (SQ 65442), denbufylline (BRL 30892), ICI63197, and RP73401 can be used.

### Other Agents for Use in Combitherapy

[0305] Also within the disclosure are pharmaceutical compositions comprising a peptide or agonists described herein and a second therapeutic agent. The second therapeutic agent can be administered to treat any condition for which it is useful, including conditions that are not considered to be the primary indication for treatment with the second therapeutic agent. The second therapeutic agent can be administered simultaneously or sequentially. The second therapeutic agent can be covalently linked to the peptides and agonists described herein to create a therapeutic conjugate. When the second therapeutic agent is another peptide, a linker including those described herein may be used between the peptide described herein and the second therapeutic peptide.

[0306] Examples of therapeutic agents used to treat heart failure include diuretics (e.g. furesomide (Lasix), bumetanide (Bumex), ethacrynic acid (Edecrin), torsemide (Demadex), amiloride (Midamor), spironolactone. (Aldactone), chorthiazide (Diuril), metolazone (Zaroxylyn)), Angiotension-Converting Enzyme (ACE) inhibitors (e.g. captopril (Capoten), enalopril (Vasotec), lisinopril (Prinivil, Zestril), ramipril (Altace)), Beta blockers (e.g. carvedilol (Coreg) and Inotropes (e.g. digoxin, dobutaimine, dopamine Milrinone).

[0307] Examples of additional therapeutic agents to treat gastrointestinal and other disorders include:

agents to treat constipation (e.g., a chloride channel activator such as the bicylic fatty acid, Lubiprostone (formerly known as SPI-0211; Sucampo Pharmaceuticals, Inc.; Bethesda, Md.), a laxative (eg. a bulk-forming laxative (e.g. nonstarch polysaccharides, Colonel Tablet (polycarbophil calcium), Plantago Ovata®, Equalactin® (Calcium Polycarbophil)), fiber (e.g. FIBERCON® (Calcium Polycarbophil), an osmotic laxative, a stimulant laxative (such as diphenylmethanes (e.g. bisacodyl), anthraquinones (e.g. cascara, senna), and surfactant laxatives (e.g. castor oil, docusates), an emollient/lubricating agent (such as mineral oil, glycerine, and docusates), MiraLax (Braintree Laboratories, Braintree Mass.), dexloxiglumide (Forest Laboratories, also known as CR 2017 Rottapharm (Rotta Research Laboratorium SpA)), saline laxatives, enemas, suppositories, and CR 3700 (Rottapharm (Rotta Research Laboratorium SpA);
acid reducing agents such as proton pump inhibitors (e.g., omeprazole (Prilosec®), esomeprazole (Nexium®), lansoprazole (Prevacid®), pantoprazole (Protonix®) and rabeprazole (Aciphex®)) and Histamine H2-receptor antagonist (also known as H2 receptor blockers including cimetidine, ranitidine, famotidine and nizatidine);
prokinetic agents including itopride, octreotide, bethanechol, metoclopramide (Reglan®), domperidone (Motilium®), erythromycin (and derivatives thereof) or cisapride (propulsid®);
prokineticin peptides homologs, variants and chimeras thereof including those described in U.S. Pat. No. 7,052,674 which can be used with or linked to the peptides described herein; pro-motility agents such as the vasostatin-derived peptide, chromogranin A (4-16) (see, e.g., Ghia et al. 2004 Regulatory Peptides 121:31) or motilin agonists (e.g., GM-611 or mitemcinal fumarate) or nociceptin/Orphanin FQ receptor modulators (US20050169917);
other peptides which can bind to and/or activate GC-C including those described in US20050287067;
complete or partial 5HT (e.g. 5HT1, 5HT2, 5HT3, 5HT4) receptor agonists or antagonists (including 5HT1A antagonists (e.g. AGI-001 (AGI therapeutics), 5HT2B antagonists (e.g. PGN1091 and PGN1164 (Pharmagene Laboratories Limited), and 5HT4 receptor agonists (such as tegaserod (ZELNORM®), prucalopride, mosapride, metoclopramide, zacopride, cisapride, renzapride, benzimidazolone derivatives such as BIMU 1 and BIMU 8, and lirexapride). Such agonists/modulatos are described in: EP1321142 A1, WO 03/053432A1, EP 505322 A1, EP 505322 B1, U.S. Pat. No. 5,510,353, EP 507672 A1, EP 507672 B1, U.S. Pat. No. 5,273,983, and U.S. Pat. No. 6,951,867); 5HT3 receptor agonists such as MKC-733; and 5HT3 receptor antagonists such as DDP-225 (MC1-225; Dynogen Pharmaceuticals, Inc.), cilansetron (Calmactin®), alosetron (Lotronex®), Ondansetron HCl (Zofran®), Dolasetron (ANZEMET4), palonosetron (Aloxi®), Granisetron (Kytril®), YM060 (ramosetron; Astellas Pharma Inc.; ramosetron may be given as a daily dose of 0.002 to 0.02 mg as described in EP01588707) and ATI-7000 (Aryx Therapeutics, Santa Clara Calif.);
muscarinic receptor agonists;
anti-inflammatory agents;
antispasmodics including but not limited to anticholinergic drugs (like dicyclomine (e.g. Colimex®, Formulex®, Lomine®, Protylol®, Viscerol®, Spasmoban®, Bentyl®, Bentylol®), hyoscyamine (e.g. IB-Stat®, Nulev®, Levsin®, Levbid®, Levsinex Timecaps®, Levsin/SL®, Anaspaz®, A-Spas S/L®, Cystospaz®, Cystospaz-M®, Donnamar®, Colidrops Liquid Pediatric®, Gastrosed®, Hyco Elixir®, Hyosol®, Hyospaz®, Hyosyne®, Losamine®, Medispaz®, Neosol®, Spacol®, Spasdel®, Symax®, Symax SL®), Donnatal (e.g. Donnatal Extentabs®), clidinium (e.g. Quarzan, in combination with Librium=Librax), methantheline (e.g. Banthine), Mepenzolate (e.g. Cantil), homatropine (e.g. hycodan, Homapin), Propantheline bromide (e.g. Pro-Banthine), Glycopyrrolate (e.g. Robinul®, Robinul Forte®), scopolamine (e.g. Transderm-Scop®, Transderm-V®), hyosine-N-butylbromide (e.g. Buscopan®), Pirenzepine (e.g. Gastrozepin®) Propantheline Bromide (e.g. Propanthel®), dicycloverine (e.g. Merbentyl®), glycopyrronium bromide (e.g. Glycopyrrolate®), hyoscine hydrobromide, hyoscine methobromide, methanthelinium, and octatropine); peppermint oil; and direct smooth muscle relaxants like cimetropium bromide, mebeverine (DUSPATAL®, DUSPATALIN®, COLOFAC MR®, COLOTAL®), otilonium bromide (octilonium), pinaverium (e.g. Dicetel® (pinaverium bromide; Solvay S.A.)), Spasfon® (hydrated phloroglucinol and trimethylphloroglucinol) and trimebutine (including trimebutine maleate (Modulon®);
antidepressants, including but not limited to those listed herein, as well as tricyclic antidepressants like amitriptyline (Elavil®), desipramine (Norpramin®), imipramine (Tofranil®), amoxapine (Asendin®), nortriptyline; the selective serotonin reuptake inhibitors (SSRI's) like paroxetine (Paxil®), fluoxetine (Prozac®), sertraline (Zoloft®), and citralopram (Celexa®); and others like doxepin (Sinequan®) and trazodone (Desyrel®);
centrally-acting analgesic agents such as opioid receptor agonists, opioid receptor antagonists (e.g., naltrexone);
agents for the treatment of Inflammatory bowel disease;
agents for the treatment of Crohn's disease and/or ulcerative colitis (e.g., alequel (Enzo Biochem, Inc.; Farmingsale, N.Y.), the anti-inflammatory peptide RDP58 (Genzyme, Inc.; Cambridge, Mass.), and TRAFICET-EN™ (ChemoCentryx, Inc.; San Carlos, Calif.);
agents that treat gastrointestinal or visceral pain;
agents that increase cGMP levels (as described in US20040121994) like adrenergic receptor antagonists, dopamine receptor agonists and PDE (phosphodiesterase) inhibitors including but not limited to those disclosed herein;
purgatives that draw fluids to the intestine (e.g., VISICOL®, a combination of sodium phosphate monobasic monohydrate and sodium phosphate dibasic anhydrate);
Corticotropin Releasing Factor (CRF) receptor antagonists (including NBI-34041 (Neurocrine Biosciences, San Diego, Calif.), CRH9-41, astressin, R121919 (Janssen Pharmaceutica), CP154,526, NBI-27914, Antalarmin, DMP696 (Bristol-Myers Squibb) CP-316,311 (Pfizer, Inc.), SB723620 (GSK), GW876008 (Neurocrine/Glaxo Smith Kline), ONO-2333Ms (Ono Pharmaceuticals), TS-041 (Janssen), AAG561 (Novartis) and those disclosed in U.S. Pat. No. 5,063,245, U.S. Pat. No. 5,861,398, US20040224964, US20040198726, US20040176400, US20040171607, US20040110815, US20040006066, and US20050209253);
glucagon-like peptides (glp-1) and analogues thereof (including exendin-4 and GTP-010 (Gastrotech Pharma A)) and inhibitors of DPP-IV (DPP-IV mediates the inactivation of glp-1);
tofisopam, enantiomerically-pure R-tofisopam, and pharmaceutically-acceptable salts thereof (US 20040229867);
tricyclic anti-depressants of the dibenzothiazepine type including but not limited to Dextofisopam® (Vela Pharmaceuticals), tianeptine (Stablon®) and other agents described in U.S. Pat. No. 6,683,072;
(E)-4 (1,3bis(cyclohexylmethyl)-1,2,34,-tetrahydro-2,6-diono-9H-purin-8-yl)cinnamic acid nonaethylene glycol methyl ether ester and related compounds described in WO 02/067942;
the probiotic PROBACTRIX® (The BioBalance Corporation; New York, N.Y.) which contains microorganisms useful in the treatment of gastrointestinal disorders;
antidiarrheal drugs including but not limited to loperamide (Imodium, Pepto Diarrhea), diphenoxylate with atropine (Lomotil, Lomocot), cholestyramine (Questran, Cholybar), atropine (Co-Phenotrope, Diarsed, Diphenoxylate, Lofene, Logen, Lonox, Vi-Atro, atropine sulfate injection) and Xifaxan® (rifaximin; Salix Pharmaceuticals Ltd), TZP-201 (Tranzyme Pharma Inc.), the neuronal acetylcholine receptor (nAChR) blocker AGI-004 (AGI therapeutics), and bismuth subsalicylate (Pepto-bismol);
anxiolytic drugs including but not limited to Ativan (lorazepam), alprazolam (Xanax®), chlordiazepoxide/clidinium (Librium®, Librax®), clonazepam (Klonopin®), clorazepate (Tranxene®), diazepam (Valium®), estazolam (ProSom®), flurazepam (Dalmane®), oxazepam (Serax®), prazepam (Centrax®), temazepam (Restoril®), triazolam (Halcion®;
Bedelix® (Montmorillonite beidellitic; Ipsen Ltd), Solvay SLV332 (ArQule Inc), YKP (SK Pharma), Asimadoline (Tioga Pharmaceuticals/Merck), AGI-003 (AGI Therapeutics);
neurokinin antagonists including those described in US20060040950;
potassium channel modulators including those described in U.S. Pat. No. 7,002,015;
the serotonin modulator AZD7371 (AstraZeneca Plc);
M3 muscarinic receptor antagonists such as darifenacin (Enablex; Novartis AG and zamifenacin (Pfizer);
herbal and natural therapies including but not limited to acidophilus, chamomile tea, evening primrose oil, fennel seeds, wormwood, comfrey, and compounds of Bao-Ji-Wan (magnolol, honokiol, imperatorin, and isoimperatorin) as in U.S. Pat. No. 6,923,992; and
compositions comprising lysine and an anti-stress agent for the treatment of irritable bowel syndrome as described in EP01550443.

[0308] The peptides and agonists described herein can be used in combination therapy with insulin and related compounds including primate, rodent, or rabbit insulin including biologically active variants thereof including allelic variants, more preferably human insulin available in recombinant form. Sources of human insulin include pharmaceutically acceptable and sterile formulations such as those available from Eli Lilly (Indianapolis, Ind. 46285) as Humulin™ (human insulin rDNA origin). See the THE PHYSICIAN'S DESK REFERENCE, 55.sup.th Ed. (2001) Medical Economics, Thomson Healthcare (disclosing other suitable human insulins). The peptides and agonists described herein can also be used in combination therapy with agents that can boost insulin effects or levels of a subject upon administration, e.g. glipizide and/or rosiglitazone. The peptides and agonists described herein can be used in combitherapy with SYMLIN® (pramlintide acetate) and Exenatide® (synthetic exendin-4; a 39 aa peptide).

[0309] The peptides and agonists described herein can also be used in combination therapy with agents (e.g., Entereg™ (alvimopan; formerly called adolor/ADL 8-2698), conivaptan and related agents describe in U.S. Pat. No. 6,645,959) used for the treatment of postoperative ileus and other disorders.

[0310] The peptides and agonists described herein can be used in combination therapy with an anti-hypertensive agent including but not limited to:

[0311] (1) diuretics, such as thiazides, including chlorthalidone, chlorthiazide, dichlorophenamide, hydroflumethiazide, indapamide, polythiazide, and hydrochlorothiazide; loop diuretics, such as bumetanide, ethacrynic acid, furosemide, and torsemide; potassium sparing agents, such as amiloride, and triamterene; carbonic anhydrase inhibitors, osmotics (such as glycerin) and aldosterone antagonists, such as spironolactone, epirenone, and the like; (2) beta-adrenergic blockers such as acebutolol, atenolol, betaxolol, bevantolol, bisoprolol, bopindolol, carteolol, carvedilol, celiprolol, esmolol, indenolol, metaprolol, nadolol, nebivolol, penbutolol, pindolol, propanolol, sotalol, tertatolol, tilisolol, and timolol, and the like;

[0312] (3) calcium channel blockers such as amlodipine, aranidipine, azelnidipine, barnidipine, benidipine, bepridil, cinaldipine, clevidipine, diltiazem, efonidipine, felodipine, gallopamil, isradipine, lacidipine, lemildipine, lercanidipine, nicardipine, nifedipine, nilvadipine, nimodepine, nisoldipine, nitrendipine, manidipine, pranidipine, and verapamil, and the like;

[0313] (4) angiotensin converting enzyme (ACE) inhibitors such as benazepril; captopril; ceranapril; cilazapril; delapril; enalapril; enalopril; fosinopril; imidapril; lisinopril; losinopril; moexipril; quinapril; quinaprilat; ramipril; perindopril; perindropril; quanipril; spirapril; tenocapril; trandolapril, and zofenopril, and the like;

[0314] (5) neutral endopeptidase inhibitors such as omapatrilat, cadoxatril and ecadotril, fosidotril, sampatrilat, AVE7688, ER4030, and the like;

[0315] (6) endothelin antagonists such as tezosentan, A308165, and YM62899, and the like;

[0316] (7) vasodilators such as hydralazine, clonidine, minoxidil, and nicotinyl alcohol, and the like;

[0317] (8) angiotensin II receptor antagonists such as aprosartan, candesartan, eprosartan, irbesartan, losartan, olmesartan, pratosartan, tasosartan, telmisartan, valsartan, and EXP-3137, F16828K, and RNH6270, and the like;

[0318] (9) α/β adrenergic blockers such as nipradilol, arotinolol and amosulalol, and the like;

[0319] (10) alpha 1 blockers, such as terazosin, urapidil, prazosin, tamsulosin, bunazosin, trimazosin, doxazosin, naftopidil, indoramin, WHP 164, and XEN010, and the like;

[0320] (11) alpha 2 agonists such as lofexidine, tiamenidine, moxonidine, rilmenidine and guanobenz, and the like;

[0321] (12) aldosterone inhibitors, and the like; and

[0322] (13) angiopoietin-2-binding agents such as those disclosed in WO03/030833.

[0323] Specific anti-hypertensive agents that can be used in combination with peptides and agonists described herein include, but are not limited to:

diuretics, such as thiazides (e.g., chlorthalidone, cyclothiazide (CAS RN 2259-96-3), chlorothiazide (CAS RN 72956-09-3, which may be prepared as disclosed in US2809194), dichlorophcnamide, hydroflumethiazide, indapamide, polythiazide, bendroflumethazide, methyclothazide, polythiazide, trichlormethazide, chlorthalidone, indapamide, metolazone, quinethazone, althiazide (CAS RN 5588-16-9, which may be prepared as disclosed in British Patent No. 902,658), benzthiazide (CAS RN 91-33-8, which may be prepared as disclosed in U.S. Pat. No. 3,108,097), buthiazide (which may be prepared as disclosed in British Patent Nos. 861,367), and hydrochlorothiazide), loop diuretics (e.g. bumetanide, ethacrynic acid, furosemide, and torasemide), potassium sparing agents (e.g. amiloride, and triamterene (CAS Number 396-01-0)), and aldosterone antagonists (e.g. spironolactone (CAS Number 52-01-7), epirenone, and the like); β-adrenergic blockers such as Amiodarone (Cordarone, Pacerone), bunolol hydrochloride (CAS RN 31969-05-8, Parke-Davis), acebutolol (±N-[3-Acetyl-4-[2-hydroxy-3-[(1 methylethyl)amino]propoxy]phenyl]-butanamide, or (±)-3′-Acetyl-4′-[2-hydroxy-3-(isopropylamino)propoxy]butyranilide), acebutolol hydrochloride (e.g. Sectral®, Wyeth-Ayerst), alprenolol hydrochloride (CAS RN 13707-88-5 see Netherlands Patent Application No. 6,605,692), atenolol (e.g. Tenormin®, AstraZeneca), carteolol hydrochloride (e.g. Cartrol® Filmtab®, Abbott), Celiprolol hydrochloride (CAS RN 57470-78-7, also see in U.S. Pat. No. 4,034,009), cetamolol hydrochloride (CAS RN 77590-95-5, see also U.S. Pat. No. 4,059,622), labetalol hydrochloride (e.g. Normodyne®, Schering), esmolol hydrochloride (e.g. Brevibloc®,Baxter), levobetaxolol hydrochloride (e.g. Betaxon™ Ophthalmic Suspension, Alcon), levobunolol hydrochloride (e.g. Betagan® Liquifilm® with C CAP® Compliance Cap, Allergan), nadolol (e.g. Nadolol, Mylan), practolol (CAS RN 6673-35-4, see also U.S. Pat. No. 3,408,387), propranolol hydrochloride (CAS RN 318-98-9), sotalol hydrochloride (e.g. Betapace AFT™, Berlex), timolol (2-Propanol,1-[(1,1-dimethylethyl)amino]-3-[[4-4(4-morpholinyl)-1,2,5-thiadiazol-3-yl]oxy]-, hemihydrate, (S)—, CAS RN 91524-16-2), timolol maleate (S)-1-[(1,1-dimethylethyl) amino]-3-[[4-(4-morpholinyl)-1,2,5-thiadiazol-3-yl]oxy]-2-propanol (Z)-2-butenedioate (1:1) salt, CAS RN 26921-17-5), bisoprolol (2-Propanol, 1-[4-[[2-(1-methylethoxy)ethoxy]-methyl]phenoxyl]-3-[(1-meth-ylethyl)amino]-, (±), CAS RN 66722-44-9), bisoprolol fumarate (such as (±)-1-[4-[[2-(1-Methylethoxy) ethoxy]methyl]phenoxy]-3-[(1-methylethyl)amino]-2-propanol (E)-2-butenedioate (2:1) (salt), e.g., Zebeta™, Lederle Consumer), nebivalol (2H-1-Benzopyran-2-methanol, αα′-[iminobis(methylene)]bis[6-fluoro-3,4-dihydro-, CAS RN 99200-09-6 see also U.S. Pat. No. 4,654,362), cicloprolol hydrochloride, such 2-Propanol, 14442-(cyclopropylmethoxy)ethoxy]phenoxy]-3-[1-methylethyl)amino]-, hydrochloride, A.A.S. RN 63686-79-3), dexpropranolol hydrochloride (2-Propanol,1-[1-methylethy)-amino]-3-(1-naphthalenyloxy)-hydrochloride (CAS RN 13071-11-9), diacetolol hydrochloride (Acetamide, N-[3-acetyl-4-[2-hydroxy-3-[(1-methyl-ethyl)amino]propoxy][phenyl]-, monohydrochloride CAS RN 69796-04-9), dilevalol hydrochloride (Benzamide, 2-hydroxy-5-[1-hydroxy-2-[1-methyl-3-phenylpropyl)amino]ethyl]-, monohydrochloride, CAS RN 75659-08-4), exaprolol hydrochloride (2-Propanol, 1-(2-cyclohexylphenoxy)-3-[(1-methylethyl)amino]-, hydrochloride CAS RN 59333-90-3), flestolol sulfate (Benzoic acid, 2-fluoro-,3-[[2-[aminocarbonyl)amino]-1-dimethylethyl]amino]-2-hydroxypropyl ester, (±)-sulfate (1:1) (salt), CAS RN 88844-73-9; metalol hydrochloride (Methanesulfonamide, N-[4-[1-hydroxy-2-(methylamino)propyl]phenyl]-, monohydrochloride CAS RN 7701-65-7), metoprolol 2-Propanol, 144-(2-methoxyethyl)phenoxy]-3[1-methylethyl)amino]-; CAS RN 37350-58-6), metoprolol tartrate (such as 2-Propanol, 1-[4-(2-methoxyethyl)phenoxy]-3-[(1-methylethyl)amino]-, e.g., Lopressor®, Novartis), pamatolol sulfate (Carbamic acid, [2-[4-[2-hydroxy-3-[(1-methylethyl)amino]propoxyl]phenyl]-ethyl]-, methyl ester, (±) sulfate (salt) (2:1), CAS RN 59954-01-7), penbutolol sulfate (2-Propanol, 1-(2-cyclopentylphenoxy)-3-[1,1-dimethyle-thyl)amino]1, (S)—, sulfate (2:1) (salt), CAS RN 38363-32-5), practolol (Acetamide, N-[4-[2-hydroxy-3-[(1-methylethyl)amino]-propoxy]phenyl]-, CAS RN 6673-35-4;) tiprenolol hydrochloride (Propanol, 1-[(1-methylethyl)amino]-3-[2-(methylthio)-phenoxy]-, hydrochloride, (±), CAS RN 39832-43-4), tolamolol (Benzamide, 4-[2-[[2-hydroxy-3-(2-methylphenoxy)-propyl]amino]ethoxyl]-, CAS RN 38103-61-6), bopindolol, indenolol, pindolol, propanolol, tertatolol, and tilisolol, and the like; calcium channel blockers such as besylate salt of amlodipine (such as 3-ethyl-5-methyl-2-(2-aminoethoxymethyl)-4-(2-chlorophenyl)-1,4-dihydro-6-methyl-3,5-pyridinedicarboxylate benzenesulphonate, e.g., Norvasc®, Pfizer), clentiazem maleate (1,5-Benzothiazepin-4(5H)-one, 3-(acetyloxy)-8-chloro-5-[2-(dimethylamino)ethyl]-2,3-dihydro-2-(4-methoxyphenyl)-(2S-cis)-, (Z)-2-butenedioate (1:1), see also U.S. Pat. No. 4,567,195), isradipine (3,5-Pyridinedicarboxylic acid, 4-(4-benzofurazanyl)-1,4-dihydro-2,6-dimethyl-, methyl 1-methylethyl ester, (±)-4(4-benzofurazanyl)-1,4-dihydro-2,6-dimethyl-3,5-pyridinedicarboxylate, see also U.S. Pat. No. 4,466,972); nimodipine (such as is isopropyl (2-methoxyethyl) 1,4-dihydro-2,6-dimethyl-4-(3-nitrophenyl)-3,5-pyridine-dicarboxylate, e.g. Nimotop®, Bayer), felodipine (such as ethyl methyl 4-(2,3-dichlorophenyl)-1,4-dihydro-2,6-dimethyl-3,5-pyridinedicarboxylate-, e.g. Plendil® Extended-Release, AstraZeneca LP), nilvadipine (3,5-Pyridinedicarboxylic acid, 2-cyano-1,4-dihydro-6-methyl-4-(3-nitrophenyl)-,3-methyl 5-(1-methylethyl) ester, also see U.S. Pat. No. 3,799,934), nifedipine (such as 3,5-pyridinedicarboxylic acid,1,4-dihydro-2,6-dimethyl-4-(2-nitrophenyl)-, dimethyl ester, e.g., Procardia XL® Extended Release Tablets, Pfizer), diltiazem hydrochloride (such as 1,5-Benzothiazepin-4(5H)-one,3-(acetyloxy)-5[2-(dimethylamino)ethyl]-2,-3-dihydro-2(4-methoxyphenyl)-, monohydrochloride, (+)-cis., e.g., Tiazac®, Forest), verapamil hydrochloride (such as benzeneacetronitrile, (alpha)-[[3-[[2-(3,4-dimethoxyphenyl)ethyl]methylamino]propyl]-3,4-dimethoxy-(alpha)-(1-methylethyl)hydrochloride, e.g., Isoptin® SR, Knoll Labs), teludipine hydrochloride (3,5-Pyridinedicarboxylic acid, 2-[(dimethylamino)methyl]4-[2-[(1E)-3-(1,1-dimethylethoxy)-3-oxo-1-propenyl]phenyl]-1,4-dihydro-6-methyl-, diethyl ester, monohydrochloride) CAS RN 108700-03-4), belfosdil (Phosphonic acid, [2-(2-phenoxyethyl)-1,3-propane-diyl]bis-, tetrabutyl ester CAS RN 103486-79-9), fostedil (Phosphonic acid, [[4-(2-benzothiazolyl)phenyl]methyl]-, diethyl ester CAS RN 75889-62-2), aranidipine, azelnidipine, barnidipine, benidipine, bepridil, cinaldipine, clevidipine, efonidipine, gallopamil, lacidipine, lemildipine, lercanidipine, monatepil maleate (1-Piperazinebutanamide, N-(6,11-dihydrodibenzo(b,e)thiepin-1′-yl)₄-(4-fluorophenyl)-, (±)-, (Z)-2-butenedioate (1:1) (±)-N-(6,11-Dihydrodibenzo(b,e)thiep-in-11-yl)-4-(p-fluorophenyl)-1-piperazinebutyramide maleate (1:1) CAS RN 132046-06-1), nicardipine, nisoldipine, nitrendipine, manidipine, pranidipine, and the like;
T-channel calcium antagonists such as mibefradil; angiotensin converting enzyme (ACE) inhibitors such as benazepril, benazepril hydrochloride (such as 3-[[1-(ethoxycarbonyl)-3-phenyl-(1S)-propyl]amino]-2,3,4,5-tetrahydro-2-oxo-1H-1-(3S)-benzazepine-1-acetic acid monohydrochloride, e.g., Lotrel®, Novartis), captopril (such as 1-[(2S)-3-mercapto-2-methylpropionyl]-L-proline, e.g., Captopril, Mylan, CAS RN 62571-86-2 and others disclosed in U.S. Pat. No. 4,046,889), ceranapril (and others disclosed in U.S. Pat. No. 4,452,790), cetapril (alacepril, Dainippon disclosed in Eur. Therap. Res. 39:671 (1986); 40:543 (1986)), cilazapril (Hoffman-LaRoche) disclosed in J. Cardiovasc. Pharmacol. 9:39 (1987), indalapril (delapril hydrochloride (2H-1,2,4-Benzothiadiazine-7-sulfonamide, 3-bicyclo[2.2.1]hept-5-en-2-yl-6-chloro-3,4-dihydro-, 1,1-dioxide CAS RN 2259-96-3); disclosed in U.S. Pat. No. 4,385,051), enalapril (and others disclosed in U.S. Pat. No. 4,374,829), enalapril, enalaprilat, fosinopril, ((such as L-proline, 4-cyclohexyl-1-[[[2-methyl-1-(1-oxopropoxy) propoxy](4-phenylbutyl) phosphinyl]acetyl]-, sodium salt, trans-, e.g., Monopril, Bristol-Myers Squibb and others disclosed in U.S. Pat. No. 4,168,267), fosinopril sodium (L-Proline, 4-cyclohexyl-1-[[(R)-[(1S)-2-methyl-1-(1-ox-opropoxy)propox), imidapril, indolapril (Schering, disclosed in J. Cardiovasc. Pharmacol. 5:643, 655 (1983)), lisinopril (Merck), losinopril, moexipril, moexipril hydrochloride (3-Isoquinolinecarboxylic acid, 2-[(2S)-2-[[(1S)-1-(ethoxycarbonyl)-3-phenylpropyl]amino]-1-oxopropyl]-1,-2,3,4-tetrahydro-6,7-dimethoxy-, monohydrochloride, (3S)—CAS RN 82586-52-5), quinapril, quinaprilat, ramipril (Hoechsst) disclosed in EP 79022 and Curr. Ther. Res. 40:74 (1986), perindopril erbumine (such as 2S,3aS,7aS-1-[(S)—N—[(S)-1-Carboxybutyl]alanyl]hexahydro-2-indolinecarboxylic acid, 1-ethyl ester, compound with tert-butylamine (1:1), e.g., Aceon®, Solvay), perindopril (Servier, disclosed in Eur. J. clin. Pharmacol. 31:519 (1987)), quanipril (disclosed in U.S. Pat. No. 4,344,949), spirapril (Schering, disclosed in Acta. Pharmacol. Toxicol. 59 (Supp. 5):173 (1986)), tenocapril, trandolapril, zofenopril (and others disclosed in U.S. Pat. No. 4,316,906), rentiapril (fentiapril, disclosed in Clin. Exp. Pharmacol. Physiol. 10:131 (1983)), pivopril, YS980, teprotide (Bradykinin potentiator BPP9a CAS RN 35115-60-7), BRL 36,378 (Smith Kline Beecham, see EP80822 and EP60668), MC-838 (Chugai, see C. A. 102:72588v and Jap. J. Pharmacol. 40:373 (1986), CGS 14824 (Ciba-Geigy, 3-([1-ethoxycarbonyl-3-phenyl-(1S)-propyl]amino)-2,3,4,5-tetrahydro-2-ox-o-1-(3S)-benzazepine-1 acetic acid HCl, see U.K. Patent No. 2103614), CGS 16,617 (Ciba-Geigy, 3(S)-[[(1S)-5-amino-1-carboxypentyl]amino]-2,3,4,-5-tetrahydro-2-oxo-1H-1-benzazepine-1-ethanoic acid, see U.S. Pat. No. 4,473,575), Ru 44570 (Hoechst, see Arzneimittelforschung 34:1254 (1985)), R 31-2201 (Hoffman-LaRoche see FEBS Lett. 165:201 (1984)), CI925 (Pharmacologist 26:243, 266 (1984)), WY-44221 (Wyeth, see J. Med. Chem. 26:394 (1983)), and those disclosed in US2003006922 (paragraph 28), U.S. Pat. No. 4,337,201, U.S. Pat. No. 4,432,971 (phosphonamidates); neutral endopeptidase inhibitors such as omapatrilat (Vanlev®), CGS 30440, cadoxatril and ecadotril, fasidotril (also known as aladotril or alatriopril), sampatrilat, mixanpril, and gemopatrilat, AVE7688, ER4030, and those disclosed in U.S. Pat. No. 5,362,727, U.S. Pat. No. 5,366,973, U.S. Pat. No. 5,225,401, U.S. Pat. No. 4,722,810, U.S. Pat. No. 5,223,516, U.S. Pat. No. 4,749,688, U.S. Pat. No. 5,552,397, U.S. Pat. No. 5,504,080, U.S. Pat. No. 5,612,359, U.S. Pat. No. 5,525,723, EP0599444, EPO481522, EP0599444, EP0595610, EP0534363, EP534396, EP534492, EP0629627; endothelin antagonists such as tezosentan, A308165, and YM62899, and the like; vasodilators such as hydralazine (apresoline), clonidine (clonidine hydrochloride (1H-Imidazol-2-amine, N-(2,6-dichlorophenyl)4,5-dihydro-, monohydrochloride CAS RN 4205-91-8), catapres, minoxidil (loniten), nicotinyl alcohol (roniacol), diltiazem hydrochloride (such as 1,5-Benzothiazepin-4(5H)-one,3-(acetyloxy)-5[2-(dimethylamino)ethyl]-2,-3-dihydro-2(4-methoxyphenyl)-, monohydrochloride, (+)-cis, e.g., Tiazac®, Forest), isosorbide dinitrate (such as 1,4:3,6-dianhydro-D-glucitol 2,5-dinitrate e.g., Isordil® Titradose®, Wyeth-Ayerst), sosorbide mononitrate (such as 1,4:3,6-dianhydro-D-glucito-1,5-nitrate, an organic nitrate, e.g., Ismo®, Wyeth-Ayerst), nitroglycerin (such as 2,3 propanetriol trinitrate, e.g., Nitrostat® Parke-Davis), verapamil hydrochloride (such as benzeneacetonitrile, (±)-(alpha)[3-[[2-(3,4 dimethoxyphenyl)ethyl]methylamino]propyl]-3,4-dimethoxy-(alpha)-(1-methylethyl) hydrochloride, e.g., Covera HS® Extended-Release, Searle), chromonar (which may be prepared as disclosed in U.S. Pat. No. 3,282,938), clonitate (Annalen 1870 155), droprenilamine (which may be prepared as disclosed in DE2521113), lidoflazine (which may be prepared as disclosed in U.S. Pat. No. 3,267,104); prenylamine (which may be prepared as disclosed in U.S. Pat. No. 3,152,173), propatyl nitrate (which may be prepared as disclosed in French Patent No. 1,103,113), mioflazine hydrochloride (1-piperazineacetamide, 3-(aminocarbonyl)₄-[4,4-bis(4-fluorophenyl)butyl]-N-(2,6-dichlorophenyl)-, dihydrochloride CAS RN 83898-67-3), mixidine (Benzeneethanamine, 3,4-dimethoxy-N-(1-methyl-2-pyrrolidinylidene)-Pyrrolidine, 2-[(3,4-dimethoxyphenethyl)imino]-1-methyl-1-Methyl-2-[(3,4-dimethoxyphenethyl)imino]pyrrolidine CAS RN 27737-38-8), molsidomine (1,2,3-Oxadiazolium, 5-[(ethoxycarbonyl)amino]-3-(4-morpholinyl)-, inner salt CAS RN 25717-80-0), isosorbide mononitrate (D-Glucitol, 1,4:3,6-dianhydro-, 5-nitrate CAS RN 16051-77-7), erythrityl tetranitrate (1,2,3,4-Butanetetrol, tetranitrate, (2R,3S)-rel-CAS RN 7297-25-8), clonitrate(1,2-Propanediol, 3-chloro-, dinitrate (7CI, 8CI, 9CI) CAS RN 2612-33-1), dipyridamole Ethanol, 2,2′,2″, 2″′-[(4,8-di-1-piperidinylpyrimido[5,4-d]pyrimidine-2,6-diyl)dinitrilo]tetrakis-CAS RN 58-32-2), nicorandil (CAS RN 65141-46-0 3-), pyridinecarboxamide (N-[2-(nitrooxy)ethyl]-Nisoldipine-3,5-Pyridinedicarboxylic acid, 1,4-dihydro-2,6-dimethyl-4-(2-nitrophenyl)-, methyl 2-methylpropyl ester CAS RN 63675-72-9), nifedipine-3,5-Pyridinedicarboxylic acid, 1,4-dihydro-2,6-dimethyl-4-(2-nitrophenyl)-, dimethyl ester CAS RN 21829-25-4), perhexiline maleate (Piperidine, 2-(2,2-dicyclohexylethyl)-, (2Z)-2-butenedioate (1:1) CAS RN 6724-53-4), oxprenolol hydrochloride (2-Propanol, 1-[(1-methylethyl)amino]-3-[2-(2-propenyloxy)phenoxy]-, hydrochloride CAS RN 6452-73-9), pentrinitrol (1,3-Propanediol, 2,2-bis[(nitrooxy)methyl]-, mononitrate (ester) CAS RN 1607-17-6), verapamil (Benzeneacetonitrile, α-[3-[[2-(3,4-dimethoxyphenyl)ethyl]-methylamino]propyl]-3,4-dimethoxy-α-(1-methylethyl)-CAS RN 52-53-9) and the like; angiotensin II receptor antagonists such as, aprosartan, zolasartan, olmesartan, pratosartan, FI6828K, RNH6270, candesartan (1H-Benzimidazole-7-carboxylic acid, 2-ethoxy-1-[[2′-(1H-tetrazol-5-yl)[1,1′-biphenyl]4-yl]methyl]-CAS RN 139481-59-7), candesartan cilexctil ((+/−)-1-(cyclohexylcarbonyloxy)ethyl-2-ethoxy-[1-[[2′-(1H-tetrazol-5-yl)biphenyl-4-yl]-1H-benzimidazole carboxylate, CAS RN 145040-37-5, U.S. Pat. No. 5,703,110 and U.S. Pat. No. 5,196,444), eprosartan (3-[1-4-carboxyphenylmethyl)-2-n-butyl-imidazol-5-yl]-(2-thienylmethyl) propenoic acid, U.S. Pat. No. 5,185,351 and U.S. Pat. No. 5,650,650), irbesartan (2-n-butyl-3-[[2′-(1h-tetrazol-5-yl)biphenyl-4-yl]methyl]1,3-diazazspiro[4,4]non-1-en-4-one, U.S. Pat. No. 5,270,317 and U.S. Pat. No. 5,352,788), losartan (2-N-butyl-4-chloro-5-hydroxymethyl-1-[(2′-(1H-tetrazol-5-yl)biphenyl-4-yl)-methyl]imidazole, potassium salt, U.S. Pat. No. 5,138,069, U.S. Pat. No. 5,153,197 and U.S. Pat. No. 5,128,355), tasosartan (5,8-dihydro-2,4-dimethyl-8-[(2′-(1H-tetrazol-5-yl)[1,1′-biphenyl]4-yl)methyl]-pyrido[2,3-d]pyrimidin-7(6H)-one, U.S. Pat. No. 5,149,699), telmisartan (4′-[(1,4-dimethyl-2′-propyl-(2,6′-bi-1H-benzimidazol)-1′-yl)]-[1,1′-biphenyl]-2-carboxylic acid, CAS RN 144701-48-4, U.S. Pat. No. 5,591,762), milfasartan, abitesartan, valsartan (Diovan® (Novartis), (S)—N-valeryl-N-[[2′-(1H-tetrazol-5-yl)biphenyl-4-yl)methyl]valine, U.S. Pat. No. 5,399,578), EXP-3137 (2-N-butyl-4-chloro-1-[(2′-(1H-tetrazol-5-yl)biphenyl-4-yl)-methyl]imidazole-5-carboxylic acid, U.S. Pat. No. 5,138,069, U.S. Pat. No. 5,153,197 and U.S. Pat. No. 5,128,355), 342% (tetrazol-5-yl)-1,1′-biphen-4-yl)methyl-5,7-dimethyl-2-ethyl-3H-imidazo[4,5-b]pyridine, 4′[2-ethyl-4-methyl-6-(5,6,7,8-tetrahydroimidazo[1,2-a]pyridin-2-yl]-benzimidazol-1-yl]-methyl]-1,1′-biphenyl]-2-carboxylic acid, 2-butyl-6-(1-methoxy-1-methylethyl)-2-[2′-)]H-tetrazol-5-yl)biphenyl-4-ylmethyl]quinazolin-4(3H)-one, 3-[2′-carboxybiphenyl-4-yl)methyl]-2-cyclopropyl-7-methyl-3H-imidazo[4,5-b]pyridine, 2-butyl-4-chloro-1-[(2′-tetrazol-5-yl)biphenyl-4-yl)methyl]imidazole-carboxylic acid, 2-butyl-4-chloro-1-[[2′-(1H-tetrazol-5-yl)[1,1′-biphenyl]-4-yl]methyl]-1H-imidazole-5-carboxylic acid-1-(ethoxycarbonyl-oxy)ethyl ester potassium salt, dipotassium 2-butyl-4-(methylthio)-1-[[2-[[[(propylamino)carbonyl]amino]-sulfonyl](1,1′-biphenyl)-4-yl]methyl]-1H-imidazole-5-carboxylate, methyl-2-[[4-butyl-2-methyl-6-oxo-5-[[2′-(1H-tetrazol-5-yl)-[1,1′-biphenyl]-4-yl]methyl]-1-(6H)-pyrimidinyl]methyl]-3-thiophencarboxylate, 5-[(3,5-dibutyl-1H-1,2,4-triazol-1-yl)methyl]-2-[2-(1H-tetrazol-5-ylphenyl)]pyridine, 6-butyl-2-(2-phenylethyl)-5[[2′-(1H-tetrazol-5-yl)[1,1′-biphenyl]-4-methyl]pyrimidin-4-(3H)-one D,L lysine salt, 5-methyl-7-n-propyl-8-[[2′-(1H-tetrazol-5-yl)biphenyl-4-yl]methyl]-[1,2,4]-triazolo[1,5-c]pyrimidin-2(3H)-one, 2,7-diethyl-5-[[2′-(5-tetrazoly)biphenyl-4-yl]methyl]-5H-pyrazolo[1,5-b][1,2,4]triazole potassium salt, 2-[2-butyl-4,5-dihydro-4-oxo-3-[2′-(1H-tetrazol-5-yl)-4-biphenylmethyl]-3H-imidazol[4,5-c]pyridine-5-ylmethyl]benzoic acid, ethyl ester, potassium salt, 3-methoxy-2,6-dimethyl-4-[[2′(1H-tetrazol-5-yl)-1,1′-biphenyl-4-yl]methoxy]pyridine, 2-ethoxy-1-[[2′-(5-oxo-2,5-dihydro-1,2,4-oxadiazol-3-yl)biphenyl-4-yl]methyl]-1,4-benzimidazole-7-carboxylic acid, 1-[N-(2′-(1H-tetrazol-5-yl)biphenyl-4-yl-methyl)-N-valerolylaminomethyl)cyclopentane-1-carboxylic acid, 7-methyl-2n-propyl-3-[[2′1H-tetrazol-5-yl)biphenyl-4-yl]methyl]-3H-imidazo[4,5-6]pyridine, 2-[5-[(2-ethyl-5,7-dimethyl-3H-imidazo[4,5-b]pyridine-3-yl)methyl]-2-quinolinyl]sodium benzoate, 2-butyl-6-chloro-4-hydroxymethyl-5-methyl-3-[[2′-(1H-tetrazol-5-yl)biphenyl-4-yl]methyl]pyridine, 2-[[[2-butyl-1-[(4-carboxyphenyl)methyl]-1H-imidazol-5-yl]methyl]amino]benzoic acid tetrazol-5-yl)biphenyl-4-yl]methyl]pyrimidin-6-one, 4(S)-[4-(carboxymethyl)phenoxy]-N-[2(R)-[4-(2-sulfobenzamido)imiduol-1-yl]octanoyl]-L-proline, 1-(2,6-dimethylphenyl)-4-butyl-1,3-dihydro-3-[[6-[2-(1H-tetrazol-5-yl)phenyl]-3-pyridinyl]methyl]-2,1-imidazol-2-one, 5,8-ethano-5,8-dimethyl-2-n-propyl-5,6,7,8-tetrahydro-1-[[2′(1H-tetrazol-5-yl)biphenyl-4-yl]methyl]-1H,4H-1,3,4a,8a-tetrazacyclopentanaphthalene-9-one, 4-[1-[2′-(1,2,3,4-tetrazol-5-yl)biphen-4-yl)methylamino]-5,6,7,8-tetrahydro-2-trifylquinazoline, 2-(2-chlorobenzoyl)imino-5-ethyl-3-[2′-(1H-tetrazole-5-yl)biphenyl-4-yl)methyl-1,3,4-thiadiazoline, 2-[5-ethyl-3-[2-(1H-tetrazole-5-yl)biphenyl-4-yl]methyl-1,3,4-thiazoline-2-ylidene]aminocarbonyl-1-cyclopentencarboxylic acid dipotassium salt, and 2-butyl-4-[N-methyl-N-(3-methylcrotonoyl)amino]-1-[[2′-(1H-tetrazol-5-yl)biphenyl-4-yl]methyl]-1H-imidzole-5-carboxylic acid 1-ethoxycarbonyloxyethyl ester, those disclosed in patent publications EP475206, EP497150, EP539086, EP539713, EP535463, EP535465, EP542059, EP497121, EP535420, EP407342, EP415886, EP424317, EP435827, EP433983, EP475898, EP490820, EP528762, EP324377, EP323841, EP420237, EP500297, EP426021, EP480204, EP429257, EP430709, EP434249, EP446062, EP505954, EP524217, EP514197, EP514198, EP514193, EP514192, EP450566, EP468372, EP485929, EP503162, EP533058, EP467207 EP399731, EP399732, EP412848, EP453210, EP456442, EP470794, EP470795, EP495626, EP495627, EP499414, EP499416, EP499415, EP511791, EP516392, EP520723, EP520724, EP539066, EP438869, EP505893, EP530702, EP400835, EP400974, EP401030, EP407102, EP411766, EP409332, EP412594, EP419048, EP480659, EP481614, EP490587, EP467715, EP479479, EP502725, EP503838, EP505098, EP505111 EP513,979 EP507594, EP510812, EP511767, EP512675, EP512676, EP512870, EP517357, EP537937, EP534706, EP527534, EP540356, EP461040, EP540039, EP465368, EP498723, EP498722, EP498721, EP515265, EP503785, EP501892, EP519831, EP532410, EP498361, EP432737, EP504888, EP508393, EP508445, EP403159, EP403158, EP425211, EP427463, EP437103, EP481448, EP488532, EP501269, EP500409, EP540400, EP005528, EP028834, EP028833, EP411507, EP425921, EP430300, EP434038, EP442473, EP443568, EP445811, EP459136, EP483683, EP518033, EP520423, EP531876, EP531874, EP392317, EP468470, EP470543, EP502314, EP529253, EP543263, EP540209, EP449699, EP465323, EP521768, EP415594, WO92/14468, WO93/08171, WO93/08169, WO91/00277, WO91/00281, WO91/14367, WO92/00067, WO92/00977, WO92/20342, WO93/04045, WO93/04046, WO91/15206, WO92/14714, WO92/09600, WO92/16552, WO93/05025, WO93/03018, WO91/07404, WO92/02508, WO92/13853, WO91/19697, WO91/11909, WO91/12001, WO91/11999, WO91/15209, WO91/15479, WO92/20687, WO92/20662, WO92/20661, WO93/01177, WO91/14679, WO91/13063, WO92/13564, WO91/17148, WO91/18888, WO91/19715, WO92/02257, WO92/04335, WO92/05161, WO92/07852, WO92/15577, WO93/03033, WO91/16313, WO92/00068, WO92/02510, WO92/09278, WO9210179, WO92/10180, WO92/10186, WO92/10181, WO92/10097, WO92/10183, WO92/10182, WO92/10187, WO92/10184, WO92/10188, WO92/10180, WO92/10185, WO92/20651, WO93/03722, WO93/06828, WO93/03040, WO92/19211, WO92/22533, WO92/06081, WO92/05784, WO93/00341, WO92/04343, WO92/04059, U.S. Pat. No. 5,104,877, U.S. Pat. No. 5,187,168, U.S. Pat. No. 5,149,699, U.S. Pat. No. 5,185,340, U.S. Pat. No. 4,880,804, U.S. Pat. No. 5,138,069, U.S. Pat. No. 4,916,129, U.S. Pat. No. 5,153,197, U.S. Pat. No. 5,173,494, U.S. Pat. No. 5,137,906, U.S. Pat. No. 5,155,126, U.S. Pat. No. 5,140,037, U.S. Pat. No. 5,137,902, U.S. Pat. No. 5,157,026, U.S. Pat. No. 5,053,329, U.S. Pat. No. 5,132,216, U.S. Pat. No. 5,057,522, U.S. Pat. No. 5,066,586, U.S. Pat. No. 5,089,626, U.S. Pat. No. 5,049,565, U.S. Pat. No. 5,087,702, U.S. Pat. No. 5,124,335, U.S. Pat. No. 5,102,880, U.S. Pat. No. 5,128,327, U.S. Pat. No. 5,151,435, U.S. Pat. No. 5,202,322, U.S. Pat. No. 5,187,159, U.S. Pat. No. 5,198,438, U.S. Pat. No. 5,182,288, U.S. Pat. No. 5,036,048, U.S. Pat. No. 5,140,036, U.S. Pat. No. 5,087,634, U.S. Pat. No. 5,196,537, U.S. Pat. No. 5,153,347, U.S. Pat. No. 5,191,086, U.S. Pat. No. 5,190,942, U.S. Pat. No. 5,177,097, U.S. Pat. No. 5,212,177, U.S. Pat. No. 5,208,234, U.S. Pat. No. 5,208,235, U.S. Pat. No. 5,212,195, U.S. Pat. No. 5,130,439, U.S. Pat. No. 5,045,540, U.S. Pat. No. 5,041,152, and U.S. Pat. No. 5,210,204, and pharmaceutically acceptable salts and esters thereof;
α/β adrenergic blockers such as nipradilol, arotinolol, amosulalol, bretylium tosylate (CAS RN: 61-75-6), dihydroergtamine mesylate (such as ergotaman-3′, 6′,18-trione,9,-10-dihydro-12′-hydroxy-2′-methyl-5′-(phenylmethyl)-,(5′(α))-, monomethanesulfonate, e.g., DHE 45® Injection, Novartis), carvedilol (such as (±)-1-(Carbazol-4-yloxy)-3-[[2-(o-methoxyphenoxy)ethyl]amino]-2-propanol, e.g., Coreg®, SmithKline Beecham), labetalol (such as 5-[1-hydroxy-2-[(1-methyl-3-phenylpropyl) amino]ethyl]salicylamide monohydrochloride, e.g., Normodyne®, Schering), bretylium tosylate (Benzenemethanaminium, 2-bromo-N-ethyl-N,N-dimethyl-, salt with 4-methylbenzenesulfonic acid (1:1) CAS RN 61-75-6), phentolamine mesylate (Phenol, 3-[[(4,5-dihydro-1H-imidazol-2-yl)methyl](4-methylphenyl)amino]-, monomethanesulfonate (salt) CAS RN 65-28-1), solypertine tartrate (5H-1,3-Dioxolo[4,5-f]indole, 7-[2-[4-(2-methoxyphenyl)-1-piperazinyl]ethyl]-, (2R,3R)-2,3-dihydroxybutanedioate (1:1) CAS RN 5591-43-5), zolertine hydrochloride (piperazine, 1-phenyl-4-[2-(1H-tetrazol-5-yl)ethyl]-, monohydrochloride (8Cl, 9Cl) CAS RN 7241-94-3) and the like;
α adrenergic receptor blockers, such as alfuzosin (CAS RN: 81403-68-1), terazosin, urapidil, prazosin (Minipress®), tamsulosin, bunazosin, trimazosin, doxazosin, naftopidil, indoramin, WHP 164, XEN010, fenspiride hydrochloride (which may be prepared as disclosed in U.S. Pat. No. 3,399,192), proroxan (CAS RN 33743-96-3), and labetalol hydrochloride and combinations thereof; a 2 agonists such as methyldopa, methyldopa HCL, lofcxidine, tiamenidine, moxonidine, rilmenidine, guanobenz, and the like; aldosterone inhibitors, and the like; renin inhibitors including Aliskiren (SPP100; Novartis/Speedel); angiopoietin-2-binding agents such as those disclosed in WO03/030833;
anti-angina agents such as ranolazine (hydrochloride1-piperazineacetamide, N-(2,6-dimethylphenyl)-4-[2-hydroxy-3-(2-methoxyphenoxy)propyl]-, dihydrochloride CAS RN 95635-56-6), betaxolol hydrochloride (2-Propanol, 1-[4-[2 (cyclopropylmethoxy)ethyl]phenoxy]-3-[(1-methylethyl)amino]-, hydrochloride CAS RN 63659-19-8), butoprozine hydrochloride (Methanone, [4-[3(dibutylamino)propoxy]phenyl](2-ethyl-3-indolizinyl)-, monohydrochloride CAS RN 62134-34-3), cinepazet maleate1-Piperazineacetic acid, 4-[1-oxo-3-(3,4,5-trimethoxyphenyl)-2-propenyl]-, ethyl ester, (2Z)-2-butenedioate (1:1) CAS RN 50679-07-7), tosifen (Benzenesulfonamide, 4-methyl-N-[[[(1S)-1-methyl-2-phenylethyl]amino]carbonyl]-CAS RN 32295-184), verapamilhydrochloride (Benzeneacetonitrile, α-[3-[2-(3,4-dimethoxyphenyl)ethyl]methylamino]propyl]-3,4-dimethoxy-α-(1-methylethyl)-, monohydrochloride CAS RN 152-114), molsidomine (1,2,3-Oxadiazolium, 5-[(ethoxycarbonyl)amino]-3-(4-morpholinyl)-, inner salt CAS RN 25717-80-0), and ranolazine hydrochloride. (1-piperazineacetamide, N-(2,6-dimethylphenyl)₄-[2-hydroxy-3-(2-meth-oxyphenoxy)propyl]-, dihydrochloride CAS RN 95635-56-6); tosifen (Benzenesulfonamide, 4-methyl-N-[[[(1S)-1-methyl-2-phenylethyl]amino]carbonyl]-CAS RN 32295-184); adrenergic stimulants such as guanfacine hydrochloride (such as N-amidino-2-(2,6-dichlorophenyl) acetamide hydrochloride, e.g., Tenex® Tablets available from Robins); methyldopa-hydrochlorothiazide (such as levo-3-(3,4-dihydroxyphenyl)-2-methylalanine) combined with Hydrochlorothiazide (such as 6-chloro-3,4-dihydro-2H-1,2,4-benzothiadiazine-7-sulfonamide 1,1-dioxide, e.g., the combination as, e.g., Aldoril® Tablets available from Merck), methyldopa-chlorothiazide (such as 6-chloro-2H-1,2,4-benzothiadiazine-7-sulfonamide 1,1-dioxide and methyldopa as described above, e.g., Aldoclor®, Merck), clonidine hydrochloride (such as 2-(2,6-dichlorophenylamino)-2-imidazoline hydrochloride and chlorthalidone (such as 2-chloro-5-(1-hydroxy-3-oxo-1-isoindolinyl) benzenesulfonamide), e.g., Combipres®, Boehringer Ingelheim), clonidine hydrochloride (such as 2-(2,6-dichlorophenylamino)-2-imidazoline hydrochloride, e.g., Catapres®, Boehringer Ingelheim), clonidine (1H-Imidazol-2-amine, N-(2,6-dichlorophenyl)4,5-dihydro-CAS RN 4205-90-7), Hyzaar (Merck; a combination of losartan and hydrochlorothiazide), Co-Diovan (Novartis; a combination of valsartan and hydrochlorothiazide, Lotrel (Novartis; a combination of benazepril and amlodipine) and Caduet (Pfizer; a combination of amlodipine and atorvastatin), and those agents disclosed in US20030069221.

[0324] The peptides and agonists described herein can be used in combination therapy with one or more of the following agents useful in the treatment of respiratory and other disorders including but not limited to:

[0325] (1) β-agonists including but not limited to: albuterol (PROVENTIL®, SALBUTAMO1®, VENTOLIN®), bambuterol, bitoterol, clenbuterol, fenoterol, formoterol, isoetharine (BRONKOSOL®, BRONKOMETER®), metaproterenol (ALUPENT®, METAPREL®), pirbuterol (MAXAIR®), reproterol, rimiterol, salmeterol, terbutaline (BRETHAIRE®, BRETHINE®, BRICANYL®), adrenalin, isoproterenol (ISUPREL®), epinephrine bitartrate (PRIMATENE®), ephedrine, orciprenline, fenoterol and isoetharine;

[0326] (2) steroids, including but not limited to beclomethasone, beclomethasone dipropionate, betamethasone, budesonide, bunedoside, butixocort, dexamethasone, flunisolide, fluocortin, fluticasone, hydrocortisone, methyl prednisone, mometasone, predonisolone, predonisone, tipredane, tixocortal, triamcinolone, and triamcinolone acetonide;

[0327] (3) β2-agonist-corticosteroid combinations [e.g., salmeterol-fluticasone (ADVAIR®), formoterol-budesonid (SYMBICORT®)];

[0328] (4) leukotriene D4 receptor antagonists/leukotriene antagonists/LTD4 antagonists (i.e., any compound that is capable of blocking, inhibiting, reducing or otherwise interrupting the interaction between leukotrienes and the Cys LTI receptor) including but not limited to: zafirlukast, montelukast, montelukast sodium (SINGULAIR®), pranlukast, iralukast, pobilukast, SKB-106,203 and compounds described as having LTD4 antagonizing activity described in U.S. Pat. No. 5,565,473;

[0329] (5) 5-lipoxygenase inhibitors and/or leukotriene biosynthesis inhibitors [e.g., zileuton and BAY1005 (CA registry 128253-31-6)];

[0330] (6) histamine H1 receptor antagonists/antihistamines (i.e., any compound that is capable of blocking, inhibiting, reducing or otherwise interrupting the interaction between histamine and its receptor) including but not limited to: astemizole, acrivastine, antazoline, azatadine, azelastine, astamizole, bromopheniramine, bromopheniramine maleate, carbinoxamine, carebastine, cetirizine, chlorpheniramine, chloropheniramine maleate, cimetidine, clemastine, cyclizine, cyproheptadine, descarboethoxyloratadine, dexchlorpheniramine, dimethindene, diphenhydramine, diphenylpyraline, doxylamine succinate, doxylamine, ebastine, efletirizine, epinastine, famotidine, fexofenadine, hydroxyzine, hydroxyzine, ketotifen, levocabastine, levocetirizine, levocetirizine, loratadine, meclizine, mepyramine, mequitazine, methdilazine, mianserin, mizolastine, noberastine, norasternizole, noraztemizole, phenindamine, pheniramine, picumast, promethazine, pynlamine, pyrilamine, ranitidine, temelastine, terfenadine, trimeprazine, tripelenamine, and triprolidine;

[0331] (7) an anticholinergic including but not limited to: atropine, benztropine, biperiden, flutropium, hyoscyamine (e.g. Levsin®; Levbid®; Levsin/SL®, Anaspaz®, Levsinex Timecaps®, NuLev®), ilutropium, ipratropium, ipratropium bromide, methscopolamine, oxybutinin, rispenzepine, scopolamine, and tiotropium;

[0332] (8) an anti-tussive including but not limited to: dextromethorphan, codeine, and hydromorphone;

[0333] (9) a decongestant including but not limited to: pseudoephedrine and phenylpropanolamine;

[0334] (10) an expectorant including but not limited to: guafenesin, guaicolsulfate, terpin, ammonium chloride, glycerol guaicolate, and iodinated glycerol;

[0335] (11) a bronchodilator including but not limited to: theophylline and aminophylline;

[0336] (12) an anti-inflammatory including but not limited to: fluribiprofen, diclophenac, indomethacin, ketoprofen, S-ketroprophen, tenoxicam;

[0337] (13) a PDE (phosphodiesterase) inhibitor including but not limited to those disclosed herein;

[0338] (14) a recombinant humanized monoclonal antibody [e.g. xolair (also called omalizumab), rhuMab, and talizumab];

[0339] (15) a humanized lung surfactant including recombinant forms of surfactant proteins SP-B, SP-C or SP-D [e.g. SURFAXIN®, formerly known as dsc-104 (Discovery Laboratories)],

[0340] (16) agents that inhibit epithelial sodium channels (ENaC) such as amiloride and related compounds;

[0341] (17) antimicrobial agents used to treat pulmonary infections such as acyclovir, amikacin, amoxicillin, doxycycline, trimethoprin sulfamethoxazole, amphotericin B, azithromycin, clarithromycin, roxithromycin, clarithromycin, cephalosporins (ceffoxitin, cefmetazole etc), ciprofloxacin, ethambutol, gentimycin, ganciclovir, imipenem, isoniazid, itraconazole, penicillin, ribavirin, rifampin, rifabutin, amantadine, rimantidine, streptomycin, tobramycin, and vancomycin;

[0342] (18) agents that activate chloride secretion through Ca++ dependent chloride channels (such as purinergic receptor (P2Y(2) agonists);

[0343] (19) agents that decrease sputum viscosity, such as human recombinant DNasc 1, (Pulmozyme®);

[0344] (20) nonsteroidal anti-inflammatory agents (acemetacin, acetaminophen, acetyl salicylic acid, alclofenac, alminoprofen, apazone, aspirin, benoxaprofen, bezpiperylon, bucloxic acid, carprofen, clidanac, diclofenac, diclofenac, diflunisal, diflusinal, etodolac, fenbufen, fenbufen, fenclofenac, fenclozic acid, fenoprofen, fentiazac, feprazone, flufenamic acid, flufenisal, flufenisal, fluprofen, flurbiprofen, flurbiprofen, furofenac, ibufenac, ibuprofen, indomethacin, indomethacin, indoprofen, isoxepac, isoxicam, ketoprofen, ketoprofen, ketorolac, meclofenamic acid, meclofenamic acid, mefenamic acid, mefenamic acid, miroprofen, mofebutazone, nabumetone oxaprozin, naproxen, naproxen, niflumic acid, oxaprozin, oxpinac, oxyphenbutazone, phenacetin, phenylbutazone, phenylbutazone, piroxicam, piroxicam, pirprofen, pranoprofen, sudoxicam, tenoxican, sulfasalazine, sulindac, sulindac, suprofen, tiaprofenic acid, tiopinac, tioxaprofen, tolfenamic acid, tolmetin, tolmetin, zidometacin, zomepirac, and zomepirac); and

[0345] (21) aerosolized antioxidant therapeutics such as S-Nitrosoglutathione.

[0346] The peptides and agonists described herein can be used in combination therapy with an anti-obesity agent. Suitable such agents include, but are not limited to:

11β HSD-1 (11-beta hydroxy steroid dehydrogenase type 1) inhibitors, such as BVT 3498, BVT 2733, 3-(1-adamantyl)-4-ethyl-5-(ethylthio)-4H-1,2,4-triazole, adamantyl)-5-(3,4,5-trimethoxyphenyl)-4-methyl-4H-1,2,4-triazole, 3-adamantanyl-4,5,6,7,8,9,10,11,12,3a-decahydro-1,2,4-triazolo[4,3-a][11]annulene, and those compounds disclosed in WO01/90091, WO01/90090, WO01/90092 and WO02/072084;
5HT antagonists such as those in WO03/037871, WO03/037887, and the like;
5HT1a modulators such as carbidopa, benserazide and those disclosed in U.S. Pat. No. 6,207,699, WO03/031439, and the like;
5HT2c (serotonin receptor 2c) agonists, such as BVT933, DPCA37215, IK264, PNU 22394, WAY161503, R-1065, SB 243213 (Glaxo Smith Kline) and YM 348 and those disclosed in U.S. Pat. No. 3,914,250, WO00/77010, WO02/36596, WO02/48124, WO02/10169, WO01/66548, WO02/44152, WO02/51844, WO02/40456, and WO02/40457;
5HT6 receptor modulators, such as those in WO03/030901, WO03/035061, WO03/039547, and the like;
acyl-estrogens, such as oleoyl-estrone, disclosed in del Mar-Grasa, M. et al., Obesity Research, 9:202-9 (2001) and Japanese Patent Application No. JP 2000256190;
anorectic bicyclic compounds such as 1426 (Aventis) and 1954 (Aventis), and the compounds disclosed in WO00/18749, WO01/32638, WO01/62746, WO01/62747, and WO03/015769;
CB 1 (cannabinoid-1 receptor) antagonist/inverse agonists such as rimonabant (Acomplia; Sanofi), SR-147778 (Sanofi), SR-141716 (Sanofi), BAY 65-2520 (Bayer), and SLV 319 (Solvay), and those disclosed in patent publications U.S. Pat. No. 4,973,587, U.S. Pat. No. 5,013,837, U.S. Pat. No. 5,081,122, U.S. Pat. No. 5,112,820, U.S. Pat. No. 5,292,736, U.S. Pat. No. 5,532,237, U.S. Pat. No. 5,624,941, U.S. Pat. No. 6,028,084, U.S. Pat. No. 6,509,367, U.S. Pat. No. 6,509,367, WO96/33159, WO97/29079, WO98/31227, WO98/33765, WO98/37061, WO98/41519, WO98/43635, WO98/43636, WO99/02499, WO00/10967, WO00/10968, WO01/09120, WO01/58869, WO01/64632, WO01/64633, WO01/64634, WO01/70700, WO01/96330, WO02/076949, WO03/006007, WO03/007887, WO03/020217, WO03/026647, WO03/026648, WO03/027069, WO03/027076, WO03/027114, WO03/037332, WO03/040107, WO03/086940, WO03/084943 and EP658546;
CCK-A (cholecystokinin-A) agonists, such as AR-R 15849, GI 181771 (GSK), JMV-180, A-71378, A-71623 and SR146131 (Sanofi), and those described in U.S. Pat. No. 5,739,106;
CNTF (Ciliary neurotrophic factors), such as GI-181771 (Glaxo-SmithKline), SR146131 (Sanofi Synthelabo), butabindide, PD170,292, and PD 149164 (Pfizer);
CNTF derivatives, such as Axokine® (Regeneron), and those disclosed in WO94/09134, WO98/22128, and WO99/43813;
dipeptidyl peptidase IV (DP-IV) inhibitors, such as isoleucine thiazolidide, valine pyrrolidide, NVP-DPP728, LAF237, P93/01, P 3298, TSL 225 (tryptophyl-1,2,3,4-tetrahydroisoquinoline-3-carboxylic acid; disclosed by Yamada et al, Bioorg. & Med. Chem. Lett. 8 (1998) 1537-1540), TMC-2A/2B/2C, CD26 inhibtors, FE 999011, P9310/K364, VIP 0177, SDZ 274-444, 2-cyanopyrrolidides and 4-cyanopyrrolidides as disclosed by Ashworth et al, Bioorg. & Med. Chem. Lett., Vol. 6, No. 22, pp 1163-1166 and 2745-2748 (1996) and the compounds disclosed patent publications. WO99/38501, WO99/46272, WO99/67279 (Probiodrug), WO99/67278 (Probiodrug), WO99/61431 (Probiodrug), WO02/083128, WO02/062764, WO03/000180, WO03/000181, WO03/000250, WO03/002530, WO03/002531, WO03/002553, WO03/002593, WO03/004498, WO03/004496, WO03/017936, WO03/024942, WO03/024965, WO03/033524, WO03/037327 and EP1258476;
growth hormone secretagogue receptor agonists/antagonists, such as NN7O₃, hexarelin, MK-0677 (Merck), SM-130686, CP-424391 (Pfizer), LY 444,711 (Eli Lilly), L-692,429 and L-163,255, and such as those disclosed in U.S. Ser. No. 09/662,448, U.S. provisional application 60/203,335, U.S. Pat. No. 6,358,951, US2002049196, US2002/022637, WO01/56592 and WO02/32888;
H3 (histamine H3) antagonist/inverse agonists, such as thioperamide, 3-(1H-imidazol-4-yl)propyl N-(4-pentenyl)carbamate), clobenpropit, iodophenpropit, imoproxifan, GT2394 (Gliatech), and A331440, O-[3-(1H-imidazol-4-yl)propanol]carbamates (Kiec-Kononowicz, K. et al., Pharmazie, 55:349-55 (2000)), piperidine-containing histamine H3-receptor antagonists (Lazewska, D. et al., Pharmazie, 56:927-32 (2001), benzophenone derivatives and related compounds (Sasse, A. et al., Arch. Pharm. (Weinheim) 334:45-52 (2001)), substituted N-phenylcarbamates (Reidemeister, S. et al., Pharmazie, 55:83-6 (2000)), and proxifan derivatives (Sasse, A. et al., J. Med. Chem. 43:3335-43 (2000)) and histamine H3 receptor modulators such as those disclosed in WO02/15905, WO03/024928 and WO03/024929;
leptin derivatives, such as those disclosed in U.S. Pat. No. 5,552,524, U.S. Pat. No. 5,552,523, U.S. Pat. No. 5,552,522, U.S. Pat. No. 5,521,283, WO96/23513, WO96/23514, WO96/23515, WO96/23516, WO96/23517, WO96/23518, WO96/23519, and WO96/23520;
leptin, including recombinant human leptin (PEG-OB, Hoffman La Roche) and recombinant methionyl human leptin (Amgen);
lipase inhibitors, such as tetrahydrolipstatin (orlistat/Xenical), Triton WR1339, RHC80267, lipstatin, teasaponin, diethylumbelliferyl phosphate, FL-386, WAY-121898, Bay-N-3176, valilactone, esteracin, ebelactone A, ebelactone B, and RHC 80267, and those disclosed in patent publications WO01/77094, U.S. Pat. No. 4,598,089, U.S. Pat. No. 4,452,813, U.S. Pat. No. 5,512,565, U.S. Pat. No. 5,391,571, U.S. Pat. No. 5,602,151, U.S. Pat. No. 4,405,644, U.S. Pat. No. 4,189,438, and U.S. Pat. No. 4,242,453;
lipid metabolism modulators such as maslinic acid, erythrodiol, ursolic acid uvaol, betulinic acid, betulin, and the like and compounds disclosed in WO03/011267;
Mc4r (melanocortin 4 receptor) agonists, such as CHIR86036 (Chiron), ME-10142, ME-10145, and HS-131 (Melacure), and those disclosed in PCT publication Nos. WO99/64002, WO00/74679, WO01/991752, WO01/25192, WO01/52880, WO01/74844, WO01/70708, WO01/70337, WO01/91752, WO02/059095, WO02/059107, WO02/059108, WO02/059117, WO02/06276, WO02/12166, WO02/11715, WO02/12178, WO02/15909, WO02/38544, WO02/068387, WO02/068388, WO02/067869, WO02/081430, WO03/06604, WO03/007949, WO03/009847, WO03/009850, WO03/013509, and WO03/031410;
Mc5r (melanocortin 5 receptor) modulators, such as those disclosed in NV097/19952, WO00/15826, WO00/15790, US20030092041;
melanin-concentrating hormone 1 receptor (MCHR) antagonists, such as T-226296 (Takeda), SB 568849, SNP-7941 (Synaptic), and those disclosed in patent publications WO01/21169, WO01/82925, WO01/87834, WO02/051809, WO02/06245, WO02/076929, WO02/076947, WO02/04433, WO02/51809, WO02/083134, WO02/094799, WO03/004027, WO03/13574, WO03/15769, WO03/028641, WO03/035624, WO03/033476, WO03/033480, JP13226269, and JP1437059;
mGluR5 modulators such as those disclosed in WO03/029210, WO03/047581, WO03/048137, WO03/051315, WO03/051833, WO03/053922, WO03/059904, and the like;
serotoninergic agents, such as fenfluramine (such as Pondimin® (Benzeneethanamine, N-ethyl-alpha-methyl-3-(trifluoromethyl)-, hydrochloride), Robbins), dexfenfluramine (such as Redux® (Benzeneethanamine, N-ethyl-alpha-methyl-3-(trifluoromethyl)-, hydrochloride), Interneuron) and sibutramine ((Meridia®, Knoll/Reductil™) including racemic mixtures, as optically pure isomers (+) and (−), and pharmaceutically acceptable salts, solvents, hydrates, clathrates and prodrugs thereof including sibutramine hydrochloride monohydrate salts thereof, and those compounds disclosed in U.S. Pat. No. 4,746,680, U.S. Pat. No. 4,806,570, and U.S. Pat. No. 5,436,272, US20020006964, WO01/27068, and WO01/62341;
NE (norepinephrine) transport inhibitors, such as GW 320659, despiramine, talsupram, and nomifensine;
NPY 1 antagonists, such as B1BP3226, J-115814, BIBO 3304, LY-357897, CP-671906, GI-264879A, and those disclosed in U.S. Pat. No. 6,001,836, WO96/14307, WO01/23387, WO99/51600, WO01/85690, WO01/85098, WO01/85173, and WO01/89528;
NPY5 (neuropeptide Y Y5) antagonists, such as 152,804, GW-569180A, GW-594884A, GW-587081X, GW-548118X, FR235208, FR226928, FR240662, FR252384, 1229U91, GI-264879A, CGP71683A, LY-377897, LY-366377, PD-160170, SR-120562A, SR-120819A, JCF-104, and H409/22 and those compounds disclosed in patent publications U.S. Pat. No. 6,140,354, U.S. Pat. No. 6,191,160, U.S. Pat. No. 6,218,408, U.S. Pat. No. 6,258,837, U.S. Pat. No. 6,313,298, U.S. Pat. No. 6,326,375, U.S. Pat. No. 6,329,395, U.S. Pat. No. 6,335,345, U.S. Pat. No. 6,337,332, U.S. Pat. No. 6,329,395, U.S. Pat. No. 6,340,683, EP01010691, EP-01044970, WO97/19682, WO97/20820, WO97/20821, WO97/20822, WO97/20823, WO98/27063, WO00/107409, WO00/185714, WO00/185730, WO00/64880, WO00/68197, WO00/69849, WO/0113917, WO01/09120, WO01/14376, WO01/85714, WO01/85730, WO01/07409, WO01/02379, WO01/23388, WO01/23389, WO01/44201, WO01/62737, WO01/62738, WO01/09120, WO02/20488, WO02/22592, WO02/48152, WO02/49648, WO02/051806, WO02/094789, WO03/009845, WO03/014083, WO03/022849, WO03/028726 and Norman et al., J. Med. Chem. 43:4288-4312 (2000); opioid antagonists, such as nalmefene (REVEX®), 3-methoxynaltrexone, methylnaltrexone, naloxone, and naltrexone (e.g. PT901; Pain Therapeutics, Inc.) and those disclosed in U.S. Pat. No. 6,734,188, US20050004155 and WO00/21509;
orexin antagonists, such as SB-334867-A and those disclosed in patent publications WO01/96302, WO01/68609, WO02/44172, WO02/51232, WO02/51838, WO02/089800, WO02/090355, WO03/023561, WO03/032991, and WO03/037847;
PDE inhibitors (e.g. compounds which slow the degradation of cyclic AMP (cAMP) and/or cyclic GMP (cGMP) by inhibition of the phosphodiesterases, which can lead to a relative increase in the intracellular concentration of cAMP and cGMP; possible PDE inhibitors are primarily those substances which are to be numbered among the class consisting of the PDE3 inhibitors, the class consisting of the PDE4 inhibitors and/or the class consisting of the PDE5 inhibitors, in particular those substances which can be designated as mixed types of PDE3/4 inhibitors or as mixed types of PDE3/4/5 inhibitors) such as those disclosed in patent publications DE1470341, DE2108438, DE2123328, DE2305339, DE2305575, DE2315801, DE2402908, DE2413935, DE2451417, DE2459090, DE2646469, DE2727481, DE2825048, DE2837161, DE2845220, DE2847621, DE2934747, DE3021792, DE3038166, DE3044568, EP000718, EP0008408, EP0010759, EP0059948, EP0075436, EP0096517, EP0112987, EP0116948, EP0150937, EP0158380, EP0161632, EP0161918, EP0167121, EP0199127, EP0220044, EP0247725, EP0258191, EP0272910, EP0272914, EP0294647, EP0300726, EP0335386, EP0357788, EP0389282, EPO406958, EPO426180, EPO428302, EPO435811, EPO470805, EPO482208, EPO490823, EP0506194, EP0511865, EP0527117, EP0626939, EP0664289, EP0671389, EP0685474, EP0685475, EP0685479, JP92234389, JP94329652, JP95010875, U.S. Pat. No. 4,963,561, U.S. Pat. No. 5,141,931, WO9117991, WO9200968, WO9212961, WO9307146, WO9315044, WO9315045, WO9318024, WO9319068, WO9319720, WO9319747, WO9319749, WO9319751, WO9325517, WO9402465, WO9406423, WO9412461, WO9420455, WO9422852, WO9425437, WO9427947, WO9500516, WO9501980, WO9503794, WO9504045, WO9504046, WO9505386, WO9508534, WO9509623, WO9509624, WO9509627, WO9509836, WO9514667, WO9514680, WO9514681, WO9517392, WO9517399, WO9519362, WO9522520, WO9524381, WO9527692, WO9528926, WO9535281, WO9535282, WO9600218, WO9601825, WO9602541, WO9611917, DE3142982, DE1116676, DE2162096, EP0293063, EPO463756, EPO482208, EP0579496, EP0667345 U.S. Pat. No. 6,331,543, US20050004222 (including those disclosed in formulas I-XIII and paragraphs 37-39, 85-0545 and 557-577), WO9307124, EP0163965, EP0393500, EP0510562, EP0553174, WO9501338 and WO9603399, as well as PDE5 inhibitors (such as RX-RA-69, SCH-51866, KT-734, vesnarinone, zaprinast, SKF-96231, ER-21355, BF/GP-385, NM-702 and sildenafil (Viagra™)), PDE4 inhibitors (such as etazolate, IC163197, RP73401, imazolidinone (RO-20-1724), MEM 1414 (R1533/R1500; Pharmacia Roche), denbufylline, rolipram, oxagrelate, nitraquazone, Y-590, DH-6471, SKF-94120, motapizone, lixazinone, indolidan, olprinone, atizoram, KS-506-G, dipamfylline, BMY-43351, atizoram, arofylline, filaminast, PDB-093, UCB-29646, CDP-840, SKF-107806, piclamilast, RS-17597, RS-25344-000, SB-207499, TIBENELAST, SB-210667, SB-211572, SB-211600, SB-212066, SB-212179, GW-3600, CDP-840, mopidamol, anagrelide, ibudilast, aminone, pimobendan, cilostazol, quazinone and N-(3,5-dichloropyrid-4-yl)-3-cyclopropylmethoxy-4-difluoromethoxybenzamide, PDE3 inhibitors (such as ICI153, 100, bemorandane (RWJ 22867), MC1-154, UD-CG 212, sulmazole, ampizone, cilostamide, carbazeran, piroximone, imazodan, CI-930, siguazodan, adibendan, saterinone, SKF-95654, SDZ-MKS-492, 349-U-85, emoradan, EMD-53998, EMD-57033, NSP-306, NSP-307, revizinone, NM-702, WIN-62582 and WIN-63291, enoximone and milrinone, PDE3/4 inhibitors (such as benafentrine, trequinsin, ORG-30029, zardaverine, L-686398, SDZ-ISQ-844, ORG-20241, EMD-54622, and tolafentrine) and other PDE inhibitors (such as vinpocetin, papaverine, enprofylline, cilomilast, fenoximone, pentoxifylline, roflumilast, tadalafil (Cialis®), theophylline, and vardenafil (Levitra®);
Neuropeptide Y2 (NPY2) agonists include but are not limited to: peptide YY and fragments and variants thereof (e.g. YY3-36 (PYY3-36) (N. Engl. J. Med. 349:941, 2003; IKPEAPGE DASPEELNRY YASLRHYLNL VTRQRY (SEQ ID NO:XXX)) and PYY agonists such as those disclosed in WO02/47712, WO03/026591, WO03/057235, and WO03/027637;
serotonin reuptake inhibitors, such as, paroxetine, fluoxetine (Prozac™), fluvoxamine, sertraline, citalopram, and imipramine, and those disclosed in U.S. Pat. No. 6,162,805, U.S. Pat. No. 6,365,633, WO03/00663, WO01/27060, and WO01/162341;
thyroid hormone β agonists, such as KB-2611 (KaroBioBMS), and those disclosed in WO02/15845, WO97/21993, WO99/00353, GB98/284425, U.S. Provisional Application No. 60/183,223, and Japanese Patent Application No. JP 2000256190;
UCP-1 (uncoupling protein-1), 2, or 3 activators, such as phytanic acid, 4-[(E)-2-(5,6,7,8-tetrahydro-5,5,8,8-tetramethyl-2-napthalenyl)-1-propenyl]benzoic acid (TTNPB), retinoic acid, and those disclosed in WO99/00123;
β3 (beta adrenergic receptor 3) agonists, such as AJ9677/TAK677 (Dainippon/Takeda), L750355 (Merck), CP331648 (Pfizer), CL-316,243, SB 418790, BRL-37344, L-796568, BMS-196085, BRL-35135A, CGP12177A, BTA-243, GW 427353, Trecadrine, Zeneca D7114, N-5984 (Nisshin Kyorin), LY-377604 (Lilly), SR 59119A, and those disclosed in U.S. Pat. No. 5,541,204, U.S. Pat. No. 5,770,615, U.S. Pat. No. 5,491,134, U.S. Pat. No. 5,776,983, U.S. Pat. No. 488,064, U.S. Pat. No. 5,705,515, U.S. Pat. No. 5,451,677, WO94/18161, WO95/29159, WO97/46556, WO98/04526 and WO98/32753, WO01/74782, WO02/32897, WO03/014113, WO03/016276, WO03/016307, WO03/024948, WO03/024953 and WO03/037881;
noradrenergic agents including, but not limited to, diethylpropion (such as Tenuate® (1-propanone, 2-(diethylamino)-1-phenyl-, hydrochloride), Merrell), dextroamphetamine (also known as dextroamphetamine sulfate, dexamphetamine, dexedrine, Dexampex, Ferndex, Oxydess II, Robese, Spancap #1), mazindol ((or 5-(p-chlorophenyl)-2,5-dihydro-3H-imidazo[2,1-a]isoindol-5-ol) such as Sanorex®, Novartis or Mazanor®, Wyeth Ayerst), phenylpropanolamine (or Benzenemethanol, alpha-(1-aminoethyl)-, hydrochloride), phentermine ((or Phenol, 3-[[4,5-duhydro-1H-imidazol-2-yl)ethyl](4-methylpheny-1)amino], monohydrochloride) such as Adipex-P®, Lemmon, FASTIN®, Smith-Kline Beecham and lonamin®, Medeva), phendimetrazine ((or (2S,3S)-3,4-Dimethyl-2-phenylmorpholine L-(+)-tartrate (1:1)) such as Metra® (Forest), Plegine® (Wyeth-Ayerst), Prelu-2® (Boehringer Ingelheim), and Statobex® (Lemmon), phendamine tartrate (such as Thephorin® (2,3,4,9-Tetrahydro-2-methyl-9-phenyl-1H-indenol[2,1-c]pyridine L-(+)-tartrate (1:1)), Hoffmann-LaRoche), methamphetamine (such as Desoxyn®, Abbot ((S)—N, (alpha)-dimethylbenzeneethanamine hydrochloride)), and phendimetrazine tartrate (such as Bontril® Slow-Release Capsules, Amarin (−3,4-Dimethyl-2-phenylmorpholine Tartrate);
fatty acid oxidation upregulator/inducers such as Famoxin® (Genset);
monamine oxidase inhibitors including but not limited to befloxatonc, moclobemide, brofaromine, phenoxathine, esuprone, befol, toloxatone, pirlindol, amiflamine, sercloremine, bazinaprine, lazabemide, milacemide, caroxazone and other certain compounds as disclosed by WO01/12176; and
other anti-obesity agents such as 5HT-2 agonists, ACC (acetyl-CoA carboxylase) inhibitors such as those described in WO03/072197, alpha-lipoic acid (alpha-LA), AOD9604, appetite suppressants such as those in WO03/40107, ATL-962 (Alizyme PLC), benzocaine, benzphetamine hydrochloride (Didrex), bladderwrack (focus vesiculosus), BRS3 (bombesin receptor subtype 3) agonists, bupropion, caffeine, CCK agonists, chitosan, chromium, conjugated linoleic acid, corticotropin-releasing hormone agonists, dehydroepiandrosterone, DGAT1 (diacylglycerol acyltransferase 1) inhibitors, DGAT2 (diacylglycerol acyltransferase 2) inhibitors, dicarboxylate transporter inhibitors, ephedra, exendin-4 (an inhibitor of glp-1) FAS (fatty acid synthase) inhibitors (such as Cerulenin and C75), fat resorption inhibitors (such as those in WO03/053451, and the like), fatty acid transporter inhibitors, natural water soluble fibers (such as psyllium, plantago, guar, oat, pectin), galanin antagonists, galega (Goat's Rue, French Lilac), garcinia cambogia, germander (teucrium chamaedrys), ghrelin antibodies and ghrelin antagonists (such as those disclosed in WO01/87335, and WO02/08250), peptide hormones and variants thereof which affect the islet cell secretion, such as the hormones of the secretin/gastric inhibitory peptide (GIP)/vasoactive intestinal peptide (VIP)/pituitary adenylate cyclase activating peptide (PACAP)/glucagon-like peptide II (GLP-II)/glicentin/glucagon gene family and/or those of the adrenomedullin/amylin/calcitonin gene related peptide (CGRP) gene family including GLP-1 (glucagon-like peptide 1) agonists (e.g. (1) exendin-4, (2) those GLP-1 molecules described in US20050130891 including GLP-1(7-34), GLP-1(7-35), GLP-1(7-36) or GLP-1(7-37) in its C-terminally carboxylated or amidated form or as modified GLP-1 peptides and modifications thereof including those described in paragraphs 17-44 of US20050130891, and derivatives derived from GLP-1-(7-34)COOH and the corresponding acid amide are employed which have the following general formula:

R—NH-HAEGTFTSDVSYLEGQAAKEFIAWLVK-CONH₂

wherein R═H or an organic compound having from 1 to 10 carbon atoms. Preferably, R is the residue of a carboxylic acid. Particularly preferred are the following carboxylic acid residues: formyl, acetyl, propionyl, isopropionyl, methyl, ethyl, propyl, isopropyl, n-butyl, sec-butyl, tert-butyl.) and glp-1 (glucagon-like peptide-1), glucocorticoid antagonists, glucose transporter inhibitors, growth hormone secretagogues (such as those disclosed and specifically described in U.S. Pat. No. 5,536,716), interleukin-6 (IL-6) and modulators thereof (as in WO03/057237, and the like), L-carnitine, Mc3r (melanocortin 3 receptor) agonists, MCH2R (melanin concentrating hormone 2R) agonist/antagonists, melanin concentrating hormone antagonists, melanocortin agonists (such as Melanotan II or those described in WO 99/64002 and WO 00/74679), nomame herba, phosphate transporter inhibitors, phytopharm compound 57 (CP 644,673), pyruvate, SCD-1 (stearoyl-CoA desaturase-1) inhibitors, T71 (Tularik, Inc., Boulder Colo.), Topiramate (Topimax®, indicated as an anti-convulsant which has been shown to increase weight loss), transcription factor modulators (such as those disclosed in WO03/026576), β-hydroxy steroid dehydrogenase-1 inhibitors (β-HSD-1), β-hydroxy-β-methylbutyrate, p57 (Pfizer), Zonisamide (Zonegran™, indicated as an anti-epileptic which has been shown to lead to weight loss), and the agents disclosed in US20030119428 paragraphs 20-26.

[0347] The peptides and agonists described herein can be used in therapeutic combination with one or more anti-diabetic agents, including but not limited to:

PPARγ agonists such as glitazones (e.g., WAY-120,744, AD 5075, balaglitazone, ciglitazone, darglitazone (CP-86325, Pfizer), englitazone (CP-68722, Pfizer), isaglitazone (MIT/J&J), MCC-555 (Mitsibishi disclosed in U.S. Pat. No. 5,594,016), pioglitazone (such as such as Actos™ pioglitazone; Takeda), rosiglitazone (Avandia™; Smith Kline Beecham), rosiglitazone maleate, troglitazone (Rezulin®, disclosed in U.S. Pat. No. 4,572,912), rivoglitazone (CS-011, Sankyo), GL-262570 (Glaxo Welcome), BRL49653 (disclosed in WO98/05331), CLX-0921, 5-BTZD, GW-0207, LG-100641, JJT-501 (JPNT/P&U), L-895645 (Merck), R-119702 (Sankyo/Pfizer), NN-2344 (Dr. Reddy/NN), YM-440 (Yamanouchi), LY-300512, LY-519818, 8483 (Roche), T131 (Tularik), and the like and compounds disclosed in U.S. Pat. No. 4,687,777, U.S. Pat. No. 5,002,953, U.S. Pat. No. 5,741,803, U.S. Pat. No. 5,965,584, U.S. Pat. No. 6,150,383, U.S. Pat. No. 6,150,384, U.S. Pat. No. 6,166,042, U.S. Pat. No. 6,166,043, U.S. Pat. No. 6,172,090, U.S. Pat. No. 6,211,205, U.S. Pat. No. 6,271,243, U.S. Pat. No. 6,288,095, U.S. Pat. No. 6,303,640, U.S. Pat. No. 6,329,404, U.S. Pat. No. 5,994,554, WO97/10813, WO97/27857, WO97/28115, WO97/28137, WO97/27847, WO00/76488, WO03/000685, WO03/027112, WO03/035602, WO03/048130, WO03/055867, and pharmaceutically acceptable salts thereof;
biguanidcs such as metformin hydrochloride (N,N-dimethylimidodicarbonimidic diamide hydrochloride, such as Glucophage™, Bristol-Myers Squibb); metformin hydrochloride with glyburide, such as Glucovance™, Bristol-Myers Squibb); buformin (Imidodicarbonimidic diamide, N-butyl-); etoforminc (1-Butyl-2-ethylbiguanide, Schering A. G.); other metformin salt forms (including where the salt is chosen from the group of, acetate, benzoate, citrate, ftimarate, embonate, chlorophenoxyacetate, glycolate, palmoate, aspartate, methanesulphonate, maleate, parachlorophenoxyisobutyrate, formate, lactate, succinate, sulphate, tartrate, cyclohexanecarboxylate, hexanoate, octanoate, decanoate, hexadecanoate, octodecanoate, benzenesulphonate, trimethoxybenzoate, paratoluenesulphonate, adamantanecarboxylate, glycoxylate, glutamate, pyrrolidonecarboxylate, naphthalenesulphonate, 1-glucosephosphate, nitrate, sulphite, dithionate and phosphate), and phenformin;
protein tyrosine phosphatase-1B (PTP-1B) inhibitors, such as A-401,674, KR 61639, OC-060062, OC-83839, OC-297962, MC52445, MC52453, ISIS 113715, and those disclosed in WO99/585521, WO99/58518, WO99/58522, WO99/61435, WO03/032916, WO03/032982, WO03/041729, WO03/055883, WO02/26707, WO02/26743, JP2002114768, and pharmaceutically acceptable salts and esters thereof; sulfonylureas such as acetohexamide (e.g. Dymelor, Eli Lilly), carbutamide, chlorpropamide (e.g. Diabinese®, Pfizer), gliamilide (Pfizer), gliclazide (e.g. Diamcron, Servier Canada Inc), glimepiride (e.g. disclosed in U.S. Pat. No. 4,379,785, such as Amaryl™, Aventis), glipentide, glipizide (e.g. Glucotrol or Glucotrol XL Extended Release, Pfizer), gliquidone, glisolamide, glyburide/glibenclamide (e.g. Micronase or Glynase Prestab, Pharmacia & Upjohn and Diabeta, Aventis), tolazamide (e.g. Tolinase), and tolbutamide (e.g. Orinase), and pharmaceutically acceptable salts and esters thereof;
meglitinides such as repaglinide (e.g. Pranidin®, Novo Nordisk), KAD1229 (PF/Kissei), and nateglinide (e.g. Starlix®, Novartis), and pharmaceutically acceptable salts and esters thereof;
α glucoside hydrolase inhibitors (or glucoside inhibitors) such as acarbose (e.g. Precose™, Bayer disclosed in U.S. Pat. No. 4,904,769), miglitol (such as GLYSET™, Pharmacia & Upjohn disclosed in U.S. Pat. No. 4,639,436), camiglibose (Methyl 6-deoxy-6-[(2R,3R,4R,5S)-3,4,5-trihydroxy-2-(hydroxymethyl)piperidino]-alpha-D-glucopyranoside, Marion Merrell Dow), voglibose (Takeda), adiposine, emiglitate, pradimicin-Q, salbostatin, CKD-711, MDL-25,637, MDL-73,945, and MOR 14, and the compounds disclosed in U.S. Pat. No. 4,062,950, U.S. Pat. No. 4,174,439, U.S. Pat. No. 4,254,256, U.S. Pat. No. 4,701,559, U.S. Pat. No. 4,639,436, U.S. Pat. No. 5,192,772, U.S. Pat. No. 4,634,765, U.S. Pat. No. 5,157,116, U.S. Pat. No. 5,504,078, U.S. Pat. No. 5,091,418, U.S. Pat. No. 5,217,877, US51091 and WO01/47528 (polyamines);
α-amylase inhibitors such as tendamistat, trestatin, and A1-3688, and the compounds disclosed in U.S. Pat. No. 4,451,455, U.S. Pat. No. 4,623,714, and U.S. Pat. No. 4,273,765;
SGLT2 inhibtors including those disclosed in U.S. Pat. No. 6,414,126 and U.S. Pat. No. 6,515,117;
an aP2 inhibitor such as disclosed in U.S. Pat. No. 6,548,529;
insulin secreatagogues such as linogliride, A-4166, forskilin, dibutyrl cAMP, isobutylmethylxanthine (IBMX), and pharmaceutically acceptable salts and esters thereof;
fatty acid oxidation inhibitors, such as clomoxir, and etomoxir, and pharmaceutically acceptable salts and esters thereof;
A2 antagonists, such as midaglizole, isaglidole, deriglidole, idazoxan, earoxan, and fluparoxan, and pharmaceutically acceptable salts and esters thereof;
insulin and related compounds (e.g. insulin mimetics) such as biota, LP-100, novarapid, insulin detemir, insulin lispro, insulin glargine, insulin zinc suspension (lente and ultralente), Lys-Pro insulin, GLP-1 (1-36) amide, GLP-1 (73-7) (insulintropin, disclosed in U.S. Pat. No. 5,614,492), LY-315902 (Lilly), GLP-1 (7-36)-NH2), AL-401 (AutoImmune), certain compositions as disclosed in U.S. Pat. No. 4,579,730, U.S. Pat. No. 4,849,405, U.S. Pat. No. 4,963,526, U.S. Pat. No. 5,642,868, U.S. Pat. No. 5,763,396, U.S. Pat. No. 5,824,638, U.S. Pat. No. 5,843,866, U.S. Pat. No. 6,153,632, U.S. Pat. No. 6,191,105, and WO 85/05029, and primate, rodent, or rabbit insulin including biologically active variants thereof including allelic variants, more preferably human insulin available in recombinant form (sources of human insulin include pharmaceutically acceptable and sterile formulations such as those available from Eli Lilly (Indianapolis, Ind. 46285) as Humulin™ (human insulin rDNA origin), also see the THE PHYSICIAN'S DESK REFERENCE, 55.sup.th Ed. (2001) Medical Economics, Thomson Healthcare (disclosing other suitable human insulins); non-thiazolidinediones such as JT-501 and farglitazar (GW-2570/GI-262579), and pharmaceutically acceptable salts and esters thereof,
PPARα/γ dual agonists such as AR-H039242 (Astrazeneca), GW-409544 (Glaxo-Wellcome), BVT-142, CLX-0940, GW-1536, GW-1929, GW-2433, KRP-297 (Kyorin Merck; 5-[(2,4-Dioxo thiazolidinyl)methyl]methoxy-N-[[4-(trifluoromethyl)phenyl]methyl]benzamide), L-796449, LR-90, MK-0767 (Merek/Kyorin/Banyu), SB 219994, muraglitazar (BMS), tesaglitzar (Astrazeneca), reglitazar (JTT-501) and those disclosed in WO99/16758, WO99/19313, WO99/20614, WO99/38850, WO00/23415, WO00/23417, WO00/23445, WO00/50414, WO01/00579, WO01/79150, WO02/062799, WO03/004458, WO03/016265, WO03/018010, WO03/033481, WO03/033450, WO03/033453, WO03/043985, WO 031053976, U.S. application Ser. No. 09/664,598, filed Sep. 18, 2000, Murakami et al. Diabetes 47, 1841-1847 (1998), and pharmaceutically acceptable salts and esters thereof;
other insulin sensitizing drugs;
VPAC2 receptor agonists;
GLK modulators, such as those disclosed in WO03/015774;
retinoid modulators such as those disclosed in WO03/000249;
GSK 3β/GSK 3 inhibitors such as 4-[2-(2-bromophenyl)-4-(4-fluorophenyl-1H-imidazol-5-yl]pyridine and those compounds disclosed in WO03/024447, WO03/037869, WO03/037877, WO03/037891, WO03/068773, EP1295884, EP1295885, and the like;
glycogen phosphorylase (HGLPa) inhibitors such as CP-368,296, CP-316,819, BAYR3401, and compounds disclosed in WO01/94300, WO02/20530, WO03/037864, and pharmaceutically acceptable salts or esters thereof;
ATP consumption promotors such as those disclosed in WO03/007990; TRB3 inhibitors;
vanilloid receptor ligands such as those disclosed in WO03/049702;
hypoglycemic agents such as those disclosed in WO03/015781 and WO03/040114;
glycogen synthase kinase 3 inhibitors such as those disclosed in WO03/035663 agents such as those disclosed in WO99/51225, US20030134890, WO01/24786, and WO03/059870;
insulin-responsive DNA binding protein-1 (IRDBP-1) as disclosed in WO03/057827, and the like;
adenosine A2 antagonists such as those disclosed in WO03/035639, WO03/035640, and the like;
PPARδ agonists such as GW 501516, GW 590735, and compounds disclosed in JP10237049 and WO02/14291;
dipeptidyl peptidase IV (DP-IV) inhibitors, such as isoleucine thiazolidide, NVP-DPP728A (1-[[[2-[(5-cyanopyridin-2-yl)amino]ethyl]amino]acetyl]-2-cyano-(S)-pyrrolidine, disclosed by Hughes et al, Biochemistry, 38(36), 11597-11603, 1999), P32/98, NVP-LAF-237, P3298, TSL225 (tryptophyl-1,2,3,4-tetrahydro-isoquinoline-3-carboxylic acid, disclosed by Yamada et al, Bioorg. & Med. Chem. Lett. 8 (1998) 1537-1540), valine pyrrolidide, TMC-2A/2B/2C, CD-26 inhibitors, FE999011, P9310/K364, VIP 0177, DPP4, SDZ 274-444, 2-cyanopyrrolidides and 4-cyanopyrrolidides as disclosed by Ashworth et al, Bioorg. & Med. Chem. Lett., Vol. 6, No. 22, pp 1163-1166 and 2745-2748 (1996), and the compounds disclosed in U.S. Pat. No. 6,395,767, U.S. Pat. No. 6,573,287, U.S. Pat. No. 6,395,767 (compounds disclosed include BMS-477118, BMS-471211 and BMS 538,305), WO99/38501, WO99/46272, WO99/67279, WO99/67278, WO99/61431 WO03/004498, WO03/004496, EP1258476, WO02/083128, WO02/062764, WO03/000250, WO03/002530, WO03/002531, WO03/002553, WO03/002593, WO03/000180, and WO03/000181;
GLP-1 agonists such as exendin-3 and exendin-4 (including the 39 aa peptide synthetic exendin-4 called Exenatide®), and compounds disclosed in US2003087821 and NZ 504256, and pharmaceutically acceptable salts and esters thereof;
peptides including amlintide and Symlin® (pramlintide acetate); and
glycokinase activators such as those disclosed in US2002103199 (fused heteroaromatic compounds) and WO02/48106 (isoindolin-1-one-substituted propionamide compounds).

[0348] The peptides and agonists described herein useful in the treatment of obesity can be administered as a cotherapy with electrostimulation (US20040015201).

[0349] The peptides and agonists described herein can be used in combination therapy with agents that activate soluble guanylate cyclase, for example those described in US20040192680.

[0350] The peptides and agonists described herein can be used in combination therapy with a phosphodiesterase inhibitor. PDE inhibitors are those compounds which slow the degradation of cyclic AMP (cAMP) and/or cyclic GMP (cGMP) by inhibition of the phosphodiesterases, which can lead to a relative increase in the intracellular concentration of cAMP and/or cGMP. Possible PDE inhibitors are primarily those substances which are to be numbered among the class consisting of the PDE3 inhibitors, the class consisting of the PDE4 inhibitors and/or the class consisting of the PDE5 inhibitors, in particular those substances which can be designated as mixed types of PDE3/4 inhibitors or as mixed types of PDE3/4/5 inhibitors. By way of example, those PDE inhibitors may be mentioned such as are described and/or claimed in the following patent applications and patents: DE1470341, DE2108438, DE2123328, DE2305339, DE2305575, DE2315801, DE2402908, DE2413935, DE2451417, DE2459090, DE2646469, DE2727481, DE2825048, DE2837161, DE2845220, DE2847621, DE2934747, DE3021792, DE3038166, DE3044568, EP000718, EP0008408, EP0010759, EP0059948, EP0075436, EP0096517, EP0112987, EP0116948, EP0150937, EP0158380, EP0161632, EP0161918, EP0167121, EP0199127, EP0220044, EP0247725, EP0258191, EP0272910, EP0272914, EP0294647, EP0300726, EP0335386, EP0357788, EP0389282, EPO406958, EPO426180, EPO428302, EPO435811, EPO470805, EPO482208, EPO490823, EP0506194, EP0511865, EP0527117, EP0626939, EP0664289, EP0671389, EP0685474, EP0685475, EP0685479, JP92234389, JP94329652, JP95010875, U.S. Pat. Nos. 4,963,561, 5,141,931, WO9117991, WO9200968, WO9212961, WO9307146, WO9315044, WO9315045, WO9318024, WO9319068, WO9319720, WO9319747, WO9319749, WO9319751, WO9325517, WO9402465, WO9406423, WO9412461, WO9420455, WO9422852, WO9425437, WO9427947, WO9500516, WO9501980, WO9503794, WO9504045, WO9504046, WO9505386, WO9508534, WO9509623, WO9509624, WO9509627, WO9509836, WO9514667, WO9514680, WO9514681, WO9517392, WO9517399, WO9519362, WO9522520, WO9524381, WO9527692, WO9528926, WO9535281, WO9535282, WO9600218, WO9601825, WO9602541, WO9611917, DE3142982, DE1116676, DE2162096, EP0293063, EPO463756, EPO482208, EP0579496, EP0667345 U.S. Pat. No. 6,331,543, US20050004222 (including those disclosed in formulas I-XIII and paragraphs 37-39, 85-0545 and 557-577) and WO9307124, EP0163965, EP0393500, EP0510562, EP0553174, WO9501338 and WO9603399. PDE5 inhibitors which may be mentioned by way of example are RX-RA-69, SCH-51866, KT-734, vesnarinone, zaprinast, SKF-96231, ER-21355, BF/GP-385, NM-702 and sildenafil (Viagra®)). PDE4 inhibitors which may be mentioned by way of example are RO-20-1724, MEM 1414 (R1533/R1500; Pharmacia Roche), DENBUFYLLINE, ROLIPRAM, OXAGRELATE, NITRAQUAZONE, Y-590, DH-6471, SKF-94120, MOTANZONE, LIXAZINONE, INDOLIDAN, OLPRINONE, ATIZORAM, KS-506-G, DIPAMFYLLINE, BMY-43351, ATIZORAM, AROFYLLINE, FILAMINAST, PDB-093, UCB-29646, CDP-840, SKF-107806, PICLAMILAST, RS-17597, RS-25344-000, SB-207499, TIBENELAST, SB-210667, SB-211572, SB-211600, SB-212066, SB-212179, GW-3600, CDP-840, MOPIDAMOL, ANAGRELIDE, IBUDILAST, AMRINONE, PIMOBENDAN, CILOSTAZOL, QUAZINONE and N-(3,5-dichloropyrid-4-yl)-3-cyclopropylmethoxy-4-difluoromethoxybenzamide. PDE3 inhibitors which may be mentioned by way of example are SULMAZOLE, AMPIZONE, CILOSTAM IDE, CARBAZERAN, PIROXIMONE, IMAZODAN, CI-930, SIGUAZODAN, ADIBENDAN, SATERINONE, SKF-95654, SDZ-MKS-492, 349-U-85, EMORADAN, EMD-53998, EMD-57033, NSP-306, NSP-307, REVIZINONE, NM-702, WIN-62582 and WIN-63291, ENOXIMONE and MILRINONE. PDE3/4 inhibitors which may be mentioned by way of example are BENAFENTRINE, TREQUINSIN, ORG-30029, ZARDAVERINE, L-686398, SDZ-ISQ-844, ORG-20241, EMD-54622, and TOLAFENTRINE. Other PDE inhibitors include: cilomilast, pentoxifylline, roflumilast, tadalafil (Cialis®), theophylline, and vardenafil (Levitra®), zaprinast (PDE5 specific).

[0351] The peptides and agonists described herein can be used in combination therapy (for example, in order to decrease or inhibit uterine contractions) with a tocolytic agent including but not limited to beta-adrenergic agents, magnesium sulfate, prostaglandin inhibitors, and calcium channel blockers.

[0352] The peptides and agonists described herein can be used in combination therapy with an anti-neoplastic agents including but not limited to alkylating agents, epipodophyllotoxins, nitrosoureas, antimetabolites, vinca alkaloids, anthracycline antibiotics, nitrogen mustard agents, and the like. Particular anti-neoplastic agents may include tamoxifen, taxol, etoposide and 5-fluorouracil. The peptides and agonists described herein can be used in combination therapy (for example as in a chemotherapeutic composition) with an antiviral and monoclonal antibody therapies.

[0353] The peptides and agonists described herein can be used in combination therapy (for example, in prevention/treatment of congestive heart failure or another method described herein) with the partial agonist of the nociceptin receptor ORL1 described by Dooley et al. (The Journal of Pharmacology and Experimental Therapeutics, 283 (2): 735-741, 1997). The agonist is a hexapeptide having the amino acid sequence Ac-RYY (RK) (WI) (RK)-NH2 (“the Dooley peptide”), where the brackets show allowable variation of amino acid residue. Thus Dooley peptide can include but are not limited to KYYRWR, RYYRWR, KWRYYR, RYYRWK, RYYRWK (all-D amin acids), RYYRIK, RYYRIR, RYYKIK, RYYKIR, RYYKWR, RYYKWK, RYYRWR, RYYRWK, RYYRIK, RYYKWR, RYYKWK, RYYRWK and KYYRWK, wherein the amino acid residues are in the L-form unless otherwise specified. The peptides and agonists described herein can also be used in combination therapy with peptide conjugate modifications of the Dooley peptide described in WO0198324.

### Methods of Treatment

[0354] A number of disorders might be prevented or treated with GC-C receptor agonists and agents that increase cGMP levels including the peptides and agonists described herein.

[0355] The peptides and agonists described herein can be used alone or in combination therapy for the treatment or prevention of congestive heart failure. Such agents can be used in combination with natriuretic peptides (e.g., atrial natriuretic peptide, brain natriuretic peptide or C-type natriuretic peptide), a diuretic, or an inhibitor of angiotensin converting enzyme.

[0356] The peptides and agonists described herein can be used alone or in combination therapy for the treatment or prevention of benign prostatic hyperplasia (BPH). Such agents can be used in combination with one or more agents for treatment of BPH, for example, a 5-alpha reductase inhibitor (e.g., finasteride) or an alpha adrenergic inhibitor (e.g., doxazosine).

[0357] The peptides and agonists described herein can be used alone or in combination therapy for the treatment, prevention or reduction of visceral pain associated with a gastrointestinal disorder or pain associated with another disorder.

[0358] The peptides and agonists described herein can be used alone or in combination therapy for the treatment or prevention of obesity-related disorders (e.g. disorders that are associated with, caused by, or result from obesity). Examples of obesity-related disorders include overeating and bulimia, hypertension, diabetes, elevated plasma insulin concentrations and insulin resistance, dyslipidemias, hyperlipidemia, endometrial, breast, prostate and colon cancer, osteoarthritis, obstructive sleep apnea, cholelithiasis, gallstones, heart disease, abnormal heart rhythms and arrhythmias, myocardial infarction, congestive heart failure, coronary heart disease, sudden death, stroke, polycystic ovarian disease, craniopharyngioma, the Prader-Willi Syndrome, Frohlich's syndrome, GH-deficient subjects, normal variant short stature, Turner's syndrome, and other pathological conditions showing reduced metabolic activity or a decrease in resting energy expenditure as a percentage of total fat-free mass, e.g., children with acute lymphoblastic leukemia. The agents described herein may be used to reduce or control body weight (or fat) or to prevent and/or treat obesity or other appetite related disorders related to the excess consumption of food, ethanol and other appetizing substances. The agents may be used to modulate lipid metabolism, reduce body fat (e.g. via increasing fat utilization) or reduce (or suppress) appetite (e.g. via inducing satiety). Further examples of obesity-related disorders are metabolic syndrome, also known as syndrome X, insulin resistance syndrome, sexual and reproductive dysfunction, such as infertility, hypogonadism in males and hirsutism in females, gastrointestinal motility disorders, such as obesity-related gastroesophageal reflux, respiratory disorders, such as obesity-hypoventilation syndrome (Pickwickian syndrome), cardiovascular disorders, inflammation, such as systemic inflammation of the vasculature, arteriosclerosis, hypercholesterolemia, hyperuricaemia, lower back pain, gallbladder disease, gout, and kidney cancer. The agents of the present disclosure are also useful for reducing the risk of secondary outcomes of obesity, such as reducing the risk of left ventricular hypertrophy.

[0359] The peptides and agonists described herein can be used alone or in combination therapy for the treatment or prevention of gastrointestinal related disorders including: chronic intestinal pseudo-obstruction (Ogilvie's syndrome), colonic pseudoobstruction, Crohn's disease, dyspepsia (including functional dyspepsia or nonulcer dyspepsia), duodenogastric reflux, functional bowel disorder, functional gastrointestinal disorders, functional heartburn, gastroesophageal reflux disease (GERD), gastrointestinal motility disorders, gastroparesis (e.g. idopathic gastroparesis), hypertrophic pyloric stenosis, Inflammatory bowel disease, irritable bowel syndrome (IBS), post-operative ileus, and ulcerative colitis. The peptides and agonists described herein can be used alone or in combination therapy to patient suffering from or susceptible to GI disorders relating to damage to the GI tract stemming from impact or surgical intervention. The peptides and agonists described herein can be used alone or in combination therapy to patients at risk for or having particular diseases associated with hypomotility (e.g. colonic inertia) or stasis in the GI tract. For example, diabetic neuropathy, anorexia nervosa, and achlorhydria are frequently accompanied by gastric hypomotility. Damage to the GI tract following surgical intervention, for instance, can result in substantial gastric stasis. The peptides and agonists described herein can be administered alone or in combination therapy to patients susceptible to or having a GI disorder associated with diabetes (e.g. diabetic gastropathy). The peptides and agonists described herein can be used alone or in combination therapy to prevent and/or treat GI disorders characterized by at least one of nausea, vomiting, heartburn, postprandial discomfort, diarrhea, constipation, indigestion or related symptoms. The peptides and agonists described herein can be used alone or in combination therapy to prevent and/or treat GI disorders associated with at least one of diabetes, anorexia nervosa, bulimia, achlorhydria, achalasia, anal fissure, haemorrhoids, irritable bowel syndrome, intestinal pseudoobstruction, scleroderma and gastrointestinal damage.

[0360] The peptides and agonists described herein can be used to prevent and/or treat constipation. Constipation can be used to describe bowel patterns which include one or more of hard, small, infrequent stools; the sensation of difficulty in passing stool, specifically excessive or ineffectual straining; the sensation of incomplete evacuation. Constipation has also been described as the passage of stool less than a certain number (e.g. 3) of times per week. A number of conditions can be associated with constipation. Constipation can be associated with numerous disorders and conditions. For example, constipation can be (1) associated with the use of a therapeutic agent (e.g. antihypertensives, anticonvulsants, antispasmodics, analgesics, anticholinergics, antidepressants, antipsychotics, cation-containing agents, anticonvulsants, ganglion blockers, vinca alkaloids); (2) associated with a muscular, neuropathic, metabolic or endocrine disorder (including but not limited to myotonic dystrophy, dermamyositis, systemic sclerosis, sclerodoma, amyloidosis (neurologic or muscular), ischemia, tumor of the central nervous system, autonomic neuropathy, Chagas disease, cystic fibrosis, diabetes mellitus, Hirschsprung disease, hyperthyroidism, hypocalcaemia, hypothyroidism, Multiple Sclerosis, neurofibromatosis, Parkinson's disease, and spinal cord lesions (for example, related to sacral nerve damage related to trauma or a tumor or the enteric nervous system)); (3) post-surgical constipation (postoperative ileus); (4) associated with a structural colon alteration (for example that associated with Neoplasm, stricture, volvulus, anorectal, inflammation, prolapse, rectocele, or fissure); (5) associated with the a gastrointestinal disorder; (6) associated with a systemic illness or disorder (for example, electrolyte abnormalities, thyroid disease, diabetes mellitus, panhypopituitarism, Addison's disease, pheochromocytoma, uremia, porphyria); (7) chronic constipation; (8) associated with the use of analgesic drugs (e.g. opioid induced constipation); (9) associated with megacolon; and (10) idiopathic constipation (functional constipation). Functional constipation can be associated with normal transit, slow transit (e.g. one or fewer bowel movements per week) and pelvic floor dyssynergia. Pelvic floor dyssynergia is considered a disorder of the rectum and anus although these patients also have abnormal contractions throughout the colon. Patients with pelvic floor dyssynergia have abnormal colonic pressure waves prior to defecation and present with symptoms that may include a sensation of incomplete evacuation, excessive straining, a need for digital disimpaction, perianal heaviness, and tenesmus. Constipation can be associated with bloating and abdominal pain. The peptides and agonists described herein can be used to prevent and/or treat low stool frequency or poor stool consistency.

[0361] The peptides and agonists described herein can be used to treat decreased intestinal motility, slow digestion or slow stomach emptying. The peptides and agonists can be used to relieve one or more symptoms of IBS (bloating, pain, constipation), GERD (acid reflux into the esophagus), duodenogastric reflux, functional dyspepsia, or gastroparesis (nausea, vomiting, bloating, delayed gastric emptying) and other disorders described herein. The peptides and agonists described herein can be used to treat flatulence.

[0362] The peptides and agonists described herein can be used to increase intestinal motility, slow colonic transit, and to prevent and/or treat gastrointestinal immotility and other conditions calling for laxative or stool softener therapy. Gastrointestinal immotility can include constipation, and also includes delayed oral cecal transit time, irregular Taxation, and other related gastrointestinal motility disfunction including impaction. Impaction is a condition where a large mass of dry, hard stool develops in the rectum, often due to chronic constipation. This mass may be so hard that it cannot be excreted. The subjects affected by constipation or gastrointestinal immotility can be refractory to laxative therapy and/or stool softener therapy.

[0363] The peptides and agonists described herein can be used for the treatment or prevention of cancer, pre-cancerous growths, or metastatic growths. For example, they can be used for the prevention or treatment of colorectal/local metastasized colorectal cancer, intestinal polyps, gastrointestinal tract cancer, lung cancer, cancer or pre-cancerous growths or metastatic growths of epithelial cells, polyps, breast, colorectal, lung, ovarian, pancreatic, prostatic, renal, stomach, bladder, liver, esophageal and testicular carcinoma, carcinoma (e.g., basal cell, basosquamous, Brown-Pearce, ductal carcinoma, Ehrlich tumor, Krebs, Merkel cell, small or non-small cell lung, oat cell, papillary, bronchiolar, squamous cell, transitional cell, (Walker), leukemia (e.g., B-cell, T-cell, HTLV, acute or chronic lymphocytic, mast cell, myeloid), histiocytonia, histiocytosis, Hodgkin's disease, non-Hodgkin's lymphoma, plasmacytoma, reticuloendotheliosis, adenoma, adeno-carcinoma, adenofibroma, adenolymphoma, ameloblastoma, angiokeratoma, angiolymphoid hyperplasia with eosinophilia, sclerosing angioma, angiomatosis, apudoma, branchionia, malignant carcinoid syndrome, carcinoid heart disease, carcinosarcoma, cementoma, cholangioma, cholesteatoma, chondrosarcoma, chondroblastoma, chondrosarcoma, chordoma, choristoma, craniopharyngioma, chrondroma, cylindroma, cystadenocarcinoma, cystadenoma, cystosarconia phyllodes, dysgenninoma, ependymoma, Ewing sarcoma, fibroma, fibrosarcoma, giant cell tumor, ganglioneuroma, glioblastoma, glomangioma, granulosa cell tumor, gynandroblastoma, hamartoma, hemangioendothelioma, hemangioma, hemangio-pericytoma, hemangiosarcoma, hepatoma, islet cell tumor, Kaposi sarcoma, leiomyoma, leiomyosarcoma, leukosarcoma, Leydig cell tumor, lipoma, liposarcoma, lymphaugioma, lymphangiomyoma, lymphangiosarcoma, medulloblastoma, meningioma, mesenchymoma, mesonephroma, mesothelioma, myoblastoma, myoma, myosarcoma, myxoma, myxosarcoma, neurilemmoma, neuroma, neuroblastoma, neuroepithelioma, neurofibroma, neurofibromatosis, odontoma, osteoma, osteosarcoma, papilloma, paraganglioma, paraganglionia. nonchromaffin, pinealoma, rhabdomyoma, rhabdomyosarcoma, Sertoli cell tumor, teratoma, theca cell tumor, and other diseases in which cells have become dysplastic, immortalized, or transformed.

[0364] The peptides and agonists described herein can be used for the treatment or prevention of Familial Adenomatous Polyposis (FAP) (autosomal dominant syndrome) that precedes colon cancer, hereditary nonpolyposis colorectal cancer (HNPCC), and inherited autosomal dominant syndrome.

[0365] For treatment or prevention of cancer, pre-cancerous growths and metastatic growths, the peptides and agonists described herein can be used in combination therapy with radiation or chemotherapeutic agents, an inhibitor of a cGMP-dependent phosphodiesterase or a selective cyclooxygenase-2 inhibitor. A number of selective cyclooxygenase-2 inhibitors are described in US20010024664, U.S. Pat. No. 5,380,738, U.S. Pat. No. 5,344,991, U.S. Pat. No. 5,393,790, U.S. Pat. No. 5,434,178, U.S. Pat. No. 5,474,995, U.S. Pat. No. 5,510,368, WO02/062369, WO 96/06840, WO 96/03388, WO 96/03387, WO 96/19469, WO 96/25405, WO 95/15316, WO 94/15932, WO 94/27980, WO 95/00501, WO 94/13635, WO 94/20480, and WO 94/26731, the disclosures of which are herein incorporated by reference. [Pyrazol-1-yl]benzenesulfonamides have also been described as inhibitors of cyclooxygenase-2.

[0366] The peptides and agonists described herein can be used in the treatment or prevention of inflammation. Thus, they can be used alone or in combination with an inhibitor of cGMP-dependent phosphodiesterase or a selective cyclooxygenase-2 inhibitor for treatment of: organ inflammation, IBD (e.g, Crohn's disease, ulcerative colitis), asthma, nephritis, hepatitis, pancreatitis, bronchitis, cystic fibrosis, ischemic bowel diseases, intestinal inflammations/allergies, coeliac disease, proctitis, eosinophilic gastroenteritis, mastocytosis, and other inflammatory disorders. The peptides and agonists described herein can be used alone or in combination therapy in the treatment or prevention of gastrointestinal tract inflammation (e.g. inflammation associated with a gastrointestinal disorder, gastrointestinal tract infection, or another disorder). They can be used alone or in combination therapy with phenoxyalkycarboxylic acid derivatives for the treatment of interstitial cystitis, irritable bowel syndrome, ulcerative colitis, and other inflammatory conditions, as mentioned in US20050239902A1.

[0367] The peptides and agonists described herein can also be used to treat or prevent insulin-related disorders, for example: II diabetes mellitus, hyperglycemia, obesity, disorders associated with disturbances in glucose or electrolyte transport and insulin secretion in cells, or endocrine disorders. They can be also used in insulin resistance treatment and post-surgical and non-post surgery decrease in insulin responsiveness.

[0368] The peptides and agonists described herein can be used to prevent and/or treat pulmonary and respiratory related disorders, including, inhalation, ventilation and mucus secretion disorders, pulmonary hypertension, chronic obstruction of vessels and airways, acute respiratory failure, and irreversible obstructions of vessels and bronchi. One may administer an agent described herein for treating bronchospasm, for inducing bronchodilation, for treating chronic obstructive pulmonary disease (including chronic bronchitis with normal airflow), for treating asthma (including bronchial asthma, intrinsic asthma, extrinsic asthma, acute asthma, chronic or inveterate asthma (e.g. late asthma and airways hyper-responsiveness), dust-induced asthma, allergen-induced asthma, viral-induced asthma, cold-induced asthma, pollution-induced asthma and exercise-induced asthma) and for treating rhinitis (including acute-, allergic, hatrophic rhinitis or chronic rhinitis (such as rhinitis caseosa, hypertrophic rhinitis, rhinitis purulenta, rhinitis sicca), rhinitis medicamentosa, membranous rhinitis (including croupous, fibrinous and pseudomembranous rhinitis), scrofulous rhinitis, perennial allergic rhinitis, seasonal rhinitis (including rhinitis nervosa (hay fever) and vasomotor rhinitis). The peptides described herein may also be useful in the treatment of dry eye disease and chronic sinusitis. The peptides described herein may also be used to prevent and/or treat disorders characterized by acute pulmonary vasoconstriction such as may result from pneumonia, traumatic injury, aspiration or inhalation injury, fat embolism in the lung, acidosis inflammation of the lung, adult respiratory distress syndrome, acute pulmonary edema, acute mountain sickness, post-cardiac surgery, acute pulmonary hypertension, persistent pulmonary hypertension of the newborn, perinatal aspiration syndrome, hyaline membrane disease, acute pulmonary thromboembolism, herapin-protamine reactions, sepsis, status asthmaticus or hypoxia (including iatrogenic hypoxia) and other forms of reversible pulmonary vasoconstriction. Such pulmonary disorders also are also characterized by inflammation of the lung including those associated with the migration into the lung of nonresident cell types including the various leucocyte subclasses. Also included in the respiratory disorders contemplated are: bullous disease, cough, chronic cough associated with inflammation or iatrogenic induced, airway constriction, pigeon fancier's disease, eosinophilic bronchitis, asthmatic bronchitis, chronic bronchitis with airway obstruction (chronic obstructive bronchitis), eosinophilic lung disease, emphysema, farmer's lung, allergic eye diseases (including allergic conjunctivitis, vernal conjunctivitis, vernal keratoconjunctivitis, and giant papillary conjunctivitis), idiopathic pulmonary fibrosis, cystic fibrosis, diffuse pan bronchiolitis and other diseases which are characterized by inflammation of the lung and/or excess mucosal secretion. Other physiological events which are contemplated to be prevented, treated or controlled include platelet activation in the lung, chronic inflammatory diseases of the lung which result in interstitial fibrosis, such as interstitial lung diseases (ILD) (e.g., idiopathic pulmonary fibrosis, or ILD associated with rheumatoid arthritis, or other autoimmune conditions), chronic obstructive pulmonary disease (COPD) (such as irreversible COPD), chronic sinusitis, fibroid lung, hypersensitivity lung diseases, hypersensitivity pneumonitis, idiopathic interstitial pneumonia, nasal congestion, nasal polyposis, and otitis media.

[0369] The peptides and agonists described herein can be used alone or in combitherapy to prevent or treat: retinopathy, nephropathy, diabetic angiopathy, and edema formation

[0370] The peptides and agonists described herein can be used alone or in combitherapy to prevent or treat neurological disorders, for example, headache, tension-type headache, migraines, anxiety, stress, cognitive disorders, cerebral ischemia, brain trauma, movement disorders, aggression, psychosis, seizures, panic attacks, hysteria, sleep disorders, depression, schizoaffective disorders, sleep apnea, attention deficit syndromes, memory loss, dementia, memory and learning disorders as discussed in Moncada and Higgs 1995 FASEB J. 9:1319-1330; Severina 1998 Biochemistry 63:794; Lee et al. 2000 PNAS 97: 10763-10768; Hobbs 1997 TIPS 18:484-491; Murad 1994 Adv. Pharmacol. 26:1-335; and Denninger et al. 1999 Biochim. Biophys. Acta 1411:334-350 and narcolepsy. They may also be used as a sedative.

[0371] The peptides and detectably peptides and agonists described herein can be used as markers to identify, detect, stage, or diagnosis diseases and conditions of small intestine, including, without limitation: Crohn's disease, colitis, inflammatory bowel disease, tumors, benign tumors, such as benign stromal tumors, adenoma, angioma, adenomatous (pedunculated and sessile) polyps, malignant, carcinoid tumors, endocrine cell tumors, lymphoma, adenocarcinoma, foregut, midgut, and hindgut carcinoma, gastroinstestinal stromal tumor (GIST), such as leiomyoma, cellular leiomyoma, leiomyoblastoma, and leiomyosarcoma, gastrointestinal autonomic nerve tumor, malabsorption syndromes, celiac diseases, diverticulosis, Meckel's diverticulum, colonic diverticula, megacolon, Hirschsprung's disease, irritable bowel syndrome, mesenteric ischemia, ischemic colitis, colorectal cancer, colonic polyposis, polyp syndrome, intestinal adenocarcinoma, Liddle syndrome, Brody myopathy, infantile convulsions, and choreoathetosis

[0372] The peptides and agonists described herein can be conjugated to another molecule (e.g., a diagnostic or therapeutic molecule) to target cells bearing the GC-C receptor, e.g., cystic fibrosis lesions and specific cells lining the intestinal tract. Thus, they can be used to target radioactive moieties or therapeutic moieties (active moieties like a radionuclide, an enzyme, a fluorescent label, a metal chelating group, a chemiluminescent label, a bioluminescent label, a chemotherapeutic, a toxin, an inactive prodrug, a radiosensitizing agent, a photodynamic agent) to the intestine to aid in imaging and diagnosing or treating colorectal/metastasized or local colorectal cancer. In addition, they can be used to deliver antisense molecules or nucleic acid molecules (like normal copies of the p53 tumor suppressor gene) to the intestinal tract. The peptides and agonists described herein can also be used to increase the number of GC-C molecules on the surface of a cell. In some embodiments the cell is a metastasized colorectal cancer cell. In one embodiment the peptide or agonist described herein is therapeutically conjugated to a second agent. In certain embodiments, the second agent can be radioactive or radiostable. In certain embodiments the second agent can be selected from the group consisting of a compound that causes cell death, a compound that inhibits cell division, a compound that induces cell differentiation, a chemotherapeutic, a toxin and a radiosensitizing agent. In certain embodiments the second agent can be selected from the group consisting of: methotrexate, doxorubicin, daunorubicin, cytosinarabinoside, etoposide, 5-4 fluorouracil, melphalan, chlorambucil, cis-platin, vindesine, mitomycin, bleomycin, purothionin, macromomycin, 1,4-benzoquinone derivatives, trenimon, ricin, ricin A chain, Pseudomonas exotoxin, diphtheria toxin, Clostridium perfringens phospholipase C, bovine pancreatic ribonuclease, pokeweed antiviral protein, abrin, abrin A chain, cobra venom factor, gelonin, saporin, modeccin, viscumin, volkensin, nitroimidazole, metronidazole and misonidazole. In certain embodiments the second agent can be a cytoxic agent selected from the group consisting of cemadotin, a derivative of cemadotin, a derivative of hemiasterlin, esperamicin C, neocarzinostatin, maytansinoid DM1, 7-chloromethyl-10,11 methylenedioxy-camptothecin, rhizoxin, and the halichondrin B analog, ER-086526.

[0373] The peptides and agonists described herein can be used alone or in combination therapy to prevent and/or treat inner ear disorders, e.g., to prevent and/or treat Meniere's disease (including symptoms thereof such as vertigo, hearing loss, tinnitus, sensation of fullness in the ear), Mal de débarquement syndrome, otitis externa, otitis media, otorrhea, acute mastoiditis, otosclerosis, otic pain, otic bleeding, otic inflammation, Lermoyez's syndrome, vestibular neuronitis, benign paroxysmal positional vertigo (BPPV), herpes zoster oticus, Ramsay Hunt's syndrome, herpes, labyrinthitis, purulent labyrinthitis, perilymph fistulas, presbycusis, ototoxicity (including drug-induced ototoxicity), neuromias (including acoustic neuromas), aerotitis media, infectious myringitis, bullous myringitis, squamous cell carcinoma, basal cell carcinoma, pre-cancerous otic conditions, nonchromaffin paragangliomas, chemodectomas, glomus jugulare tumors, glomus tympanicum tumors, perichondritis, aural eczematoid dermatitis, malignant external otitis, subperichondrial hematoma, ceruminomas, impacted cerumen, sebaceous cysts, osteomas, keloids, otalgia, tinnitus, tympanic membrane infection, tympanitis, otic furuncles, petrositis, conductive and sensorineural hearing loss, epidural abscess, lateral sinus thrombosis, subdural empyema, otitic hydrocephalus, Dandy's syndrome, bullous myringitis, diffuse external otitis, foreign bodies, keratosis obturans, otic neoplasm, otomycosis, trauma, acute barotitis media, acute eustachian tube obstruction, postsurgical otalgia, cholesteatoma, infections related to an otic surgical procedure, and complications associated with any of said disorders. The peptides and agonists described herein can be used alone or in combination therapy to maintain fluid homeostasis in the inner ear. neuronitis (including viral neuronitis), ganglionitis, geniculate

[0374] The peptides and agonists described herein can be used alone or in combination therapy to prevent and/or treat disorders associated with bicarbonate secretion, e.g., Cystic Fibrosis.

[0375] The peptides and agonists described herein can be used alone or in combination therapy to prevent and/or treat disorders associated with bile secretion. In addition, they can be used to facilitate or control chloride and bile fluid secretion in the gall bladder.

[0376] The peptides and agonists described herein can be used alone or in combination therapy to prevent and/or treat disorders associated with liver cell regeneration. This may include administration of the peptides and agonists to liver transplant recipients and to patients with drug or alcohol induced-liver damage. Furthermore, the peptides and agonists may be useful to treat liver damage as in the case of viral mediated hepatitis. The peptides and agonists described herein may be used alone or in combination to prevent and/or treat liver abscess, liver cancer (either primary or metastatic), cirrhosis (such as cirrhosis caused by the alcohol consumption or primary biliary cirrhosis), amebic liver abscess, autoimmune hepatitis, biliary atresia, coccidioidomycosis disseminated, δ agent (hepatitis δ), hemocromatosis, hepatitis a, hepatitis b, hepatitis c, or any other acute, subacute, fulminant or chronic hepatitis of viral, metabolic or toxic etiology, hepatocellular carcinoma, pyogenic liver abscess, Reye's syndrome, sclerosing cholangitis, Wilson's disease, drug induced hepatotoxicity, or fulminant or acute liver failure. The peptides and agonists may be used in stimulating hepatic regeneration after surgical hepatectomy.

[0377] The peptides and agonists described herein can be used alone or in combination therapy to prevent and/or treat myocardial infraction, coronary artery disease, nitrate-induced tolerance, nitrate tolerance, diastolic dysfunction, angina pectoris, stable, unstable and variant (Prinzmetal) angina, atherosclerosis, thrombosis, endothelial dysfunction, cardiac edema, stroke, conditions of reduced blood vessel patency, e.g., postpercutaneous transluminal coronary angioplasty (post-PTCA), and peripheral vascular disease.

[0378] The peptides and agonists described herein can be used alone or in combination therapy to prevent and/or treat glaucoma.

[0379] The peptides and agonists described herein can be used alone or in combination therapy to prevent and/or treat immunodeficiency.

[0380] The peptides and agonists described herein can be used alone or in combination therapy to prevent and/or treat bladder outlet obstruction and incontinence.

[0381] The peptides and agonists described herein can be used alone or in combination therapy to prevent and/or treat male (e.g. erectile dysfunction) or female sexual dysfunction, dysmenorrhea, endometriosis, polycystic ovary syndrome, vaginal dryness, uterine pain, or pelvic pain. These peptides and agonists described herein can be utilized as tocolytic agents that decrease or arrest uterine contractions. The peptides and agonists described herein can be used to prevent/treat premature/preterm labor. Premature or preterm labor can be associated with, for example, an illness/disorder/condition of the mother (such as pre-eclampsia, high blood pressure or diabetes, abnormal shape or size of the uterus, weak or short cervix, hormone imbalance, vaginal infection that spreads to the uterus, abnormalities of the placenta, such as placenta previa, and excessive amniotic fluid), premature rupture of the amniotic membranes (“water breaks”), large fetus, and more than one fetus. The peptides or agonists described herein can be used to prevent uterine rupture. The peptides or agonists described herein can be used treat rapid uterine contractions (for example, associated with placental abruption wherein the placental abruption is associated with hypertension, diabetes, a multiply pregnancy, an unusually large amount of amniotic fluid, numerous previous deliveries, or advanced maternal age (e.g. >40 years old). In certain embodiments they can be used in combination with a phosphodiesterase inhibitor. The peptides and agonists described herein can be used alone or in combination therapy to prevent and/or treat infertility, for example, male infertility due to poor sperm quality, decreased sperm motility or low sperm count.

[0382] The peptides and agonists described herein can be used alone or in combination therapy to prevent and/or treat osteopenia disorders (bone loss disorders). “Bone loss disorders” include conditions and diseases wherein the inhibition of bone loss and/or the promotion of bone formation is desirable. Among such conditions and diseases are osteoporosis, osteomyelitis, Paget's disease (osteitis deformans), periodontitis, hypercalcemia, osteonecrosis, osteosarcoma, osteolyic metastases, familial expansile osteolysis, prosthetic loosening, periprostetic osteolysis, bone loss attendant rheumatoid arthritis, and cleiodocranial dysplasia (CCD). Osteoporosis includes primary osteoporosis, endocrine osteoporosis (hyperthyroidism, hyperparathyroidism, Cushing's syndrome, and acromegaly), hereditary and congenital forms of osteoporosis (osteogenesis imperfecta, homocystinuria, Menkes' syndrome, and Rile-Day syndrome) and osteoporosis due to immobilization of extremitiesosteomyelitis, or an infectious lesion in bone leading to bone loss. The peptides and agonists can be used alone or in combination therapy to stimulating bone regeneration. The bone regeneration may be following reconstruction of bone defects in cranio-maxillofacial surgery, or following an implant into bone, for example a dental implant, bone supporting implant, or prosthesis. The bone regeneration may also be following a bone fracture.

[0383] The peptides and agonists described herein may be used alone or in combination therapy (for example, with other agents that increase cGMP) to prevent or treat disorders related to an alteration in cGMP including, but not limited to Alzheimer's disease, psoriasis, skin necrosis, scarring, fibrosis, baldness, Kawasaki's Disease, nutcracker oesophagus (US20050245544), septic shock, NSAID-induced gastric disease or disorder, ischemic renal disease or disorder, peptic ulcer, sickle cell anemia, epilepsy, and a neuroinflammatory disease or disorder (for example as described in WO05105765).

[0384] The peptides described herein can be used as immunogens to create antibodies for immunoassays. The peptides described herein that have homology to ST peptides can be used as immunogens to treat and/or prevent one or more disease symptoms associated with traveler's diarrhea and for vaccination against pathogens, including but not limited to enterotoxigenic E. coli (ETEC). They may also be used in vaccines which also comprise interleukin 18 and either saponin adjuvant or CpG adjuvant for example as described in WO05039634 and WO05039630. The methods described in US20040146534, U.S. Pat. No. 4,220,584, U.S. Pat. No. 4,285,391, U.S. Pat. No. 5,182,109, U.S. Pat. No. 4,603,049, U.S. Pat. No. 4,545,931, U.S. Pat. No. 4,886,663, U.S. Pat. No. 4,758,655, WO08402700, FR2525592, and FR2532850 can be similarly used to create immunogens comprising the peptides described herein. U.S. Pat. No. 6,043,057, U.S. Pat. No. 5,834,246, U.S. Pat. No. 5,268,276, and EP368819, specifically describe an expression system containing CTB (cholera toxin Beta subunit) fused to an ST-like peptide under a foreign promoter for use as a vaccine. The nucleic acids that encode the peptides described herein may be use as genetic vaccines as described in US20050260605 and WO0148018. The nucleic acid molecules may also be used for the manufacture of a functional ribonucleic acid, wherein the functional ribonucleic acid is selected from the group comprising ribozymes, antisense nucleic acids and siRNA (as described in WO05103073).

1-84. (canceled)

85. A peptide or a pharmaceutically acceptable salt thereof comprising the amino acid sequence:
Xaa₁ Xaa₂ Xaa₃ Cys Glu Xaa₆ Xaa₇ Cys Xaa₉ Pro Ala Cys Thr Gly Xaa₁₅ Xaa₁₆ (SEQ ID NO:7) or a pharmaceutically acceptable salt thereof,
wherein
Xaa₁ is any amino acid or is missing;
Xaa₂ is Ala, Gly, Lys, Ser, Val or is missing;
Xaa₃ is Cys or D-Cys;
Xaa₆ is any amino acid;
Xaa₇ is Cys or D-Cys;
Xaa₉ is Asn or Thr;
Xaa₁₅ is Cys or D-Cys;
Xaa₁₆ is Lys, Tyr or is missing;
provided that:
(a) one or more of Xaa₃, Xaa₇ and Xaa₁₅ is D-Cys when Xaa₁₆ is other than Lys; and
(b) the peptide does not consist of the sequence D-Cys Cys Glu Leu Cys Cys Asn Pro Ala Cys Thr. Gly Cys.

86. The peptide of claim 85 wherein at least one of Xaa₃, Xaa₇ and Xaa₁₅ is D-Cys.

87. The peptide of claim 86 wherein Xaa₃ is D-Cys

88. The peptide of claim 86 wherein Xaa₇ is D-Cys.

89. The peptide of claim 86 wherein Xaa₁₅ is D-Cys.

90. The peptide of claim 86 wherein Xaa₃, Xaa₇ and Xaa₁₅ are all D-Cys.

91. The peptide of claim 85 wherein Xaa₆ is Val, Ile, Leu Tyr, Phe, or Trp.

92. The peptide of claim 91 wherein Xaa₆ is Tyr, Phe, Tip, or Leu.

93. The peptide of claim 85 wherein Xaa₁ is Ala or missing.

94. The peptide of claim 85 wherein Xaa₂ is missing.

95. The peptide of claim 85 wherein Xaa₁ and Xaa₂ are missing.

96. The peptide of claim 85 wherein Xaa₉ is Thr.

97. The peptide of claim 85 wherein Xaa₉ is Asn.

98. The peptide of claim 85 wherein Xaa₁₆ is Lys or Tyr.

99. The peptide of claim 85 wherein Xaa₁₆ is missing.

100. The peptide of claim 85 wherein the peptide is PEGylated.

101. The PEGylated peptide of claim 100 wherein the peptide is PEGylated at the amino terminus.

102. The peptide of claim 85 wherein the peptide is purified.

103. A peptide comprising of a peptide selected from FIGS. 3a and 3b or a pharmaceutically acceptable salt thereof.

104. A pharmaceutical composition comprising the peptide of claim 85 and a pharmaceutically acceptable carrier.

105. A method for reducing fluid retention, the method comprising administering the pharmaceutical composition of claim 104 or a pharmaceutical composition comprising a peptide consisting of the amino acid sequence D-Cys Cys Glu Leu Cys Cys Asn Pro Ala Cys Thr Gly Cys.

106. A method of treating a disorder comprising administering to a patient in need thereof an effective amount of the pharmaceutical composition of claim 104 or a pharmaceutical composition comprising a peptide consisting of the amino acid sequence D-Cys Cys Glu Leu Cys Cys Asn Pro Ala Cys Thr Gly Cys wherein said disorder is selected from:
heart failure, hypertension, salt dependent forms of high blood pressure, hepatic edema, liver cirrhosis;
a gastrointestinal disorder, gastrointestinal pain, visceral pain, obesity;
benign prostatic hyperplasia; or
a side effect associated with opioid administration.

107. The method of claim 106 wherein said heart failure is acute heart failure or chronic heart failure.

108. The method of claim 106 wherein the gastrointestinal disorder is selected from: a gastrointestinal motility disorder, chronic intestinal pseudo-obstruction, colonic pseudo-obstruction, Crohn's disease, duodenogastric reflux, dyspepsia, functional dyspepsia, nonulcer dyspepsia, a functional gastrointestinal disorder, functional heartburn, gastroesophageal reflux disease (GERD), gastroparesis, irritable bowel syndrome, post-operative ileus, inflammatory bowel disorder, ulcerative colitis, or constipation.

109. The method of claim 108 wherein said constipation is chronic constipation, idiopathic constipation, or chronic idiopathic constipation.

110. The method of claim 108 wherein said irritable bowel syndrome is diarrhea-predominant irritable bowel syndrome, alternating-irritable bowel syndrome, or constipation-predominant irritable bowel syndrome.

111. The method of claim 108 wherein the gastrointestinal disorder is inflammatory bowel disorder.

112. The method of claim 108 wherein the gastrointestinal disorder is Crohn's disease.

113. The method of claim 108 wherein the gastrointestinal disorder is ulcerative colitis.

114. The method of claim 106 wherein the patient is being treated with an opioid selected from the group consisting of alfentanil, buprenorphine, butorphanol, codeine, dezocine, dihydrocodeine, fentanyl, hydrocodone, hydromorphone, levorphanol, meperidine (pethidine), methadone, morphine, nalbuphine, oxycodone, oxymorphone, pentazocine, propiram, propoxyphene, sufentanil and tramadol.

115. The method of claim 106 wherein the side effect is selected from the group consisting of constipation, nausea and vomiting.

116. The method of claim 106 further comprising administering an opioid antagonist.

117. A method for increasing naturesis, diuresis, or gastrointestinal motility comprising administering an effective amount of the pharmaceutical composition of claim 104 or a pharmaceutical composition comprising a peptide consisting of the amino acid sequence D-Cys Cys Glu Leu Cys Cys Asn Pro Ala Cys Thr Gly Cys to a patient in need thereof.

The application's sequence listing, which the Patent Office published only in electronic form, follows.

SEQUENCE LISTING (3452 sequences)

SEQ ID NO: 1 - protein, 14 aa, Artificial Sequence
  Synthetically generated peptide
  misc_feature (13)..(13): Xaa can be Cys or D-Cys
CCEVCCNPACTGXK

SEQ ID NO: 2 - protein, 14 aa, Artificial Sequence
  Synthetically generated peptide
  misc_feature (13)..(13): Xaa can be Cys or D-Cys
CCEVCCNPACTGXY

SEQ ID NO: 3 - protein, 13 aa, Artificial Sequence
  Synthetically generated peptide
CCEVCCTPACTGC

SEQ ID NO: 4 - protein, 14 aa, Artificial Sequence
  Synthetically generated peptide
CCEVCCTPACTGCK

SEQ ID NO: 5 - protein, 14 aa, Artificial Sequence
  Synthetically generated peptide
CCEVCCTPACTGCY

SEQ ID NO: 6 - protein, 13 aa, Artificial Sequence
  Synthetically generated peptide
  misc_feature (13)..(13): Xaa can be Cys or D-Cys
CCEVCCTPACTGX

SEQ ID NO: 7 - protein, 14 aa, Artificial Sequence
  Synthetically generated peptide
  misc_feature (13)..(13): Xaa can be Cys or D-Cys
CCEVCCTPACTGXK

SEQ ID NO: 8 - protein, 14 aa, Artificial Sequence
  Synthetically generated peptide
  misc_feature (13)..(13): Xaa can be Cys or D-Cys
CCEVCCTPACTGXY

SEQ ID NO: 9 - protein, 13 aa, Artificial Sequence
  Synthetically generated peptide
  misc_feature (5)..(5): Xaa can be Cys or D-Cys
CCEVXCNPACTGC

SEQ ID NO: 10 - protein, 14 aa, Artificial Sequence
  Synthetically generated peptide
  misc_feature (5)..(5): Xaa can be Cys or D-Cys
CCEVXCNPACTGCK

SEQ ID NO: 11 - protein, 14 aa, Artificial Sequence
  Synthetically generated peptide
  misc_feature (5)..(5): Xaa can be Cys or D-Cys
CCEVXCNPACTGCY

SEQ ID NO: 12 - protein, 13 aa, Artificial Sequence
  Synthetically generated peptide
  misc_feature (5)..(5): Xaa can be Cys or D-Cys
  misc_feature (13)..(13): Xaa can be Cys or D-Cys
CCEVXCNPACTGX

SEQ ID NO: 13 - protein, 14 aa, Artificial Sequence
  Synthetically generated peptide
  misc_feature (5)..(5): Xaa can be Cys or D-Cys
  misc_feature (13)..(13): Xaa can be Cys or D-Cys
CCEVXCNPACTGXK

SEQ ID NO: 14 - protein, 14 aa, Artificial Sequence
  Synthetically generated peptide
  misc_feature (5)..(5): Xaa can be Cys or D-Cys
  misc_feature (13)..(13): Xaa can be Cys or D-Cys
CCEVXCNPACTGXY

SEQ ID NO: 15 - protein, 13 aa, Artificial Sequence
  Synthetically generated peptide
  misc_feature (5)..(5): Xaa can be Cys or D-Cys
CCEVXCTPACTGC

SEQ ID NO: 16 - protein, 14 aa, Artificial Sequence
  Synthetically generated peptide
  misc_feature (5)..(5): Xaa can be Cys or D-Cys
CCEVXCTPACTGCK

SEQ ID NO: 17 - protein, 14 aa, Artificial Sequence
  Synthetically generated peptide
  misc_feature (5)..(5): Xaa can be Cys or D-Cys
CCEVXCTPACTGCY

SEQ ID NO: 18 - protein, 13 aa, Artificial Sequence
  Synthetically generated peptide
  misc_feature (5)..(5): Xaa can be Cys or D-Cys
  misc_feature (13)..(13): Xaa can be Cys or D-Cys
CCEVXCTPACTGX

SEQ ID NO: 19 - protein, 14 aa, Artificial Sequence
  Synthetically generated peptide
  misc_feature (5)..(5): Xaa can be Cys or D-Cys
  misc_feature (13)..(13): Xaa can be Cys or D-Cys
CCEVXCTPACTGXK

SEQ ID NO: 20 - protein, 14 aa, Artificial Sequence
  Synthetically generated peptide
  misc_feature (5)..(5): Xaa can be Cys or D-Cys
  misc_feature (13)..(13): Xaa can be Cys or D-Cys
CCEVXCTPACTGXY

SEQ ID NO: 21 - protein, 13 aa, Artificial Sequence
  Synthetically generated peptide
CCEICCNPACTGC

SEQ ID NO: 22 - protein, 14 aa, Artificial Sequence
  Synthetically generated peptide
CCEICCNPACTGCK

SEQ ID NO: 23 - protein, 14 aa, Artificial Sequence
  Synthetically generated peptide
CCEICCNPACTGCY

SEQ ID NO: 24 - protein, 13 aa, Artificial Sequence
  Synthetically generated peptide
  misc_feature (13)..(13): Xaa can be Cys or D-Cys
CCEICCNPACTGX

SEQ ID NO: 25 - protein, 14 aa, Artificial Sequence
  Synthetically generated peptide
  misc_feature (13)..(13): Xaa can be Cys or D-Cys
CCEICCNPACTGXK

SEQ ID NO: 26 - protein, 14 aa, Artificial Sequence
  Synthetically generated peptide
  misc_feature (13)..(13): Xaa can be Cys or D-Cys
CCEICCNPACTGXY

SEQ ID NO: 27 - protein, 13 aa, Artificial Sequence
  Synthetically generated peptide
CCEICCTPACTGC

SEQ ID NO: 28 - protein, 14 aa, Artificial Sequence
  Synthetically generated peptide
CCEICCTPACTGCK

SEQ ID NO: 29 - protein, 14 aa, Artificial Sequence
  Synthetically generated peptide
CCEICCTPACTGCY

SEQ ID NO: 30 - protein, 13 aa, Artificial Sequence
  Synthetically generated peptide
  misc_feature (13)..(13): Xaa can be Cys or D-Cys
CCEICCTPACTGX

SEQ ID NO: 31 - protein, 14 aa, Artificial Sequence
  Synthetically generated peptide
  misc_feature (13)..(13): Xaa can be Cys or D-Cys
CCEICCTPACTGXK

SEQ ID NO: 32 - protein, 14 aa, Artificial Sequence
  Synthetically generated peptide
  misc_feature (13)..(13): Xaa can be Cys or D-Cys
CCEICCTPACTGXY

SEQ ID NO: 33 - protein, 13 aa, Artificial Sequence
  Synthetically generated peptide
  misc_feature (5)..(5): Xaa can be Cys or D-Cys
CCEIXCNPACTGC

SEQ ID NO: 34 - protein, 14 aa, Artificial Sequence
  Synthetically generated peptide
  misc_feature (5)..(5): Xaa can be Cys or D-Cys
CCEIXCNPACTGCK

SEQ ID NO: 35 - protein, 14 aa, Artificial Sequence
  Synthetically generated peptide
  misc_feature (5)..(5): Xaa can be Cys or D-Cys
CCEIXCNPACTGCY

SEQ ID NO: 36 - protein, 13 aa, Artificial Sequence
  Synthetically generated peptide
  misc_feature (5)..(5): Xaa can be Cys or D-Cys
  misc_feature (13)..(13): Xaa can be Cys or D-Cys
CCEIXCNPACTGX

SEQ ID NO: 37 - protein, 14 aa, Artificial Sequence
  Synthetically generated peptide
  misc_feature (5)..(5): Xaa can be Cys or D-Cys
  misc_feature (13)..(13): Xaa can be Cys or D-Cys
CCEIXCNPACTGXK

SEQ ID NO: 38 - protein, 14 aa, Artificial Sequence
  Synthetically generated peptide
  misc_feature (5)..(5): Xaa can be Cys or D-Cys
  misc_feature (13)..(13): Xaa can be Cys or D-Cys
CCEIXCNPACTGXY

SEQ ID NO: 39 - protein, 13 aa, Artificial Sequence
  Synthetically generated peptide
  misc_feature (5)..(5): Xaa can be Cys or D-Cys
CCEIXCTPACTGC

SEQ ID NO: 40 - protein, 14 aa, Artificial Sequence
  Synthetically generated peptide
  misc_feature (5)..(5): Xaa can be Cys or D-Cys
CCEIXCTPACTGCK

SEQ ID NO: 41 - protein, 14 aa, Artificial Sequence
  Synthetically generated peptide
  misc_feature (5)..(5): Xaa can be Cys or D-Cys
CCEIXCTPACTGCY

SEQ ID NO: 42 - protein, 13 aa, Artificial Sequence
  Synthetically generated peptide
  misc_feature (5)..(5): Xaa can be Cys or D-Cys
  misc_feature (13)..(13): Xaa can be Cys or D-Cys
CCEIXCTPACTGX

SEQ ID NO: 43 - protein, 14 aa, Artificial Sequence
  Synthetically generated peptide
  misc_feature (5)..(5): Xaa can be Cys or D-Cys
  misc_feature (13)..(13): Xaa can be Cys or D-Cys
CCEIXCTPACTGXK

SEQ ID NO: 44 - protein, 14 aa, Artificial Sequence
  Synthetically generated peptide
  misc_feature (5)..(5): Xaa can be Cys or D-Cys
  misc_feature (13)..(13): Xaa can be Cys or D-Cys
CCEIXCTPACTGXY

SEQ ID NO: 45 - protein, 13 aa, Artificial Sequence
  Synthetically generated peptide
CCELCCNPACTGC

SEQ ID NO: 46 - protein, 14 aa, Artificial Sequence
  Synthetically generated peptide
CCELCCNPACTGCK

SEQ ID NO: 47 - protein, 14 aa, Artificial Sequence
  Synthetically generated peptide
CCELCCNPACTGCY

SEQ ID NO: 48 - protein, 13 aa, Artificial Sequence
  Synthetically generated peptide
  misc_feature (13)..(13): Xaa can be Cys or D-Cys
CCELCCNPACTGX

SEQ ID NO: 49 - protein, 14 aa, Artificial Sequence
  Synthetically generated peptide
  misc_feature (13)..(13): Xaa can be Cys or D-Cys
CCELCCNPACTGXK

SEQ ID NO: 50 - protein, 14 aa, Artificial Sequence
  Synthetically generated peptide
  misc_feature (13)..(13): Xaa can be Cys or D-Cys
CCELCCNPACTGXY

SEQ ID NO: 51 - protein, 13 aa, Artificial Sequence
  Synthetically generated peptide
CCELCCTPACTGC

SEQ ID NO: 52 - protein, 14 aa, Artificial Sequence
  Synthetically generated peptide
CCELCCTPACTGCK

SEQ ID NO: 53 - protein, 14 aa, Artificial Sequence
  Synthetically generated peptide
CCELCCTPACTGCY

SEQ ID NO: 54 - protein, 13 aa, Artificial Sequence
  Synthetically generated peptide
  misc_feature (13)..(13): Xaa can be Cys or D-Cys
CCELCCTPACTGX

SEQ ID NO: 55 - protein, 14 aa, Artificial Sequence
  Synthetically generated peptide
  misc_feature (13)..(13): Xaa can be Cys or D-Cys
CCELCCTPACTGXK

SEQ ID NO: 56 - protein, 14 aa, Artificial Sequence
  Synthetically generated peptide
  misc_feature (13)..(13): Xaa can be Cys or D-Cys
CCELCCTPACTGXY

SEQ ID NO: 57 - protein, 13 aa, Artificial Sequence
  Synthetically generated peptide
  misc_feature (5)..(5): Xaa can be Cys or D-Cys
CCELXCNPACTGC

SEQ ID NO: 58 - protein, 14 aa, Artificial Sequence
  Synthetically generated peptide
  misc_feature (5)..(5): Xaa can be Cys or D-Cys
CCELXCNPACTGCK

SEQ ID NO: 59 - protein, 14 aa, Artificial Sequence
  Synthetically generated peptide
  misc_feature (5)..(5): Xaa can be Cys or D-Cys
CCELXCNPACTGCY

SEQ ID NO: 60 - protein, 13 aa, Artificial Sequence
  Synthetically generated peptide
  misc_feature (5)..(5): Xaa can be Cys or D-Cys
  misc_feature (13)..(13): Xaa can be Cys or D-Cys
CCELXCNPACTGX

SEQ ID NO: 61 - protein, 14 aa, Artificial Sequence
  Synthetically generated peptide
  misc_feature (5)..(5): Xaa can be Cys or D-Cys
  misc_feature (13)..(13): Xaa can be Cys or D-Cys
CCELXCNPACTGXK

SEQ ID NO: 62 - protein, 14 aa, Artificial Sequence
  Synthetically generated peptide
  misc_feature (5)..(5): Xaa can be Cys or D-Cys
  misc_feature (13)..(13): Xaa can be Cys or D-Cys
CCELXCNPACTGXY

SEQ ID NO: 63 - protein, 13 aa, Artificial Sequence
  Synthetically generated peptide
  misc_feature (5)..(5): Xaa can be Cys or D-Cys
CCELXCTPACTGC

SEQ ID NO: 64 - protein, 14 aa, Artificial Sequence
  Synthetically generated peptide
  misc_feature (5)..(5): Xaa can be Cys or D-Cys
CCELXCTPACTGCK

SEQ ID NO: 65 - protein, 14 aa, Artificial Sequence
  Synthetically generated peptide
  misc_feature (5)..(5): Xaa can be Cys or D-Cys
CCELXCTPACTGCY

SEQ ID NO: 66 - protein, 13 aa, Artificial Sequence
  Synthetically generated peptide
  misc_feature (5)..(5): Xaa can be Cys or D-Cys
  misc_feature (13)..(13): Xaa can be Cys or D-Cys
CCELXCTPACTGX

SEQ ID NO: 67 - protein, 14 aa, Artificial Sequence
  Synthetically generated peptide
  misc_feature (5)..(5): Xaa can be Cys or D-Cys
  misc_feature (13)..(13): Xaa can be Cys or D-Cys
CCELXCTPACTGXK

SEQ ID NO: 68 - protein, 14 aa, Artificial Sequence
  Synthetically generated peptide
  misc_feature (5)..(5): Xaa can be Cys or D-Cys
  misc_feature (13)..(13): Xaa can be Cys or D-Cys
CCELXCTPACTGXY

SEQ ID NO: 69 - protein, 13 aa, Artificial Sequence
  Synthetically generated peptide
CCEYCCNPACTGC

SEQ ID NO: 70 - protein, 14 aa, Artificial Sequence
  Synthetically generated peptide
CCEYCCNPACTGCK

SEQ ID NO: 71 - protein, 14 aa, Artificial Sequence
  Synthetically generated peptide
CCEYCCNPACTGCY

SEQ ID NO: 72 - protein, 13 aa, Artificial Sequence
  Synthetically generated peptide
  misc_feature (13)..(13): Xaa can be Cys or D-Cys
CCEYCCNPACTGX

SEQ ID NO: 73 - protein, 14 aa, Artificial Sequence
  Synthetically generated peptide
  misc_feature (13)..(13): Xaa can be Cys or D-Cys
CCEYCCNPACTGXK

SEQ ID NO: 74 - protein, 14 aa, Artificial Sequence
  Synthetically generated peptide
  misc_feature (13)..(13): Xaa can be Cys or D-Cys
CCEYCCNPACTGXY

SEQ ID NO: 75 - protein, 13 aa, Artificial Sequence
  Synthetically generated peptide
CCEYCCTPACTGC

SEQ ID NO: 76 - protein, 14 aa, Artificial Sequence
  Synthetically generated peptide
CCEYCCTPACTGCK

SEQ ID NO: 77 - protein, 14 aa, Artificial Sequence
  Synthetically generated peptide
CCEYCCTPACTGCY

SEQ ID NO: 78 - protein, 13 aa, Artificial Sequence
  Synthetically generated peptide
  misc_feature (13)..(13): Xaa can be Cys or D-Cys
CCEYCCTPACTGX

SEQ ID NO: 79 - protein, 14 aa, Artificial Sequence
  Synthetically generated peptide
  misc_feature (13)..(13): Xaa can be Cys or D-Cys
CCEYCCTPACTGXK

SEQ ID NO: 80 - protein, 14 aa, Artificial Sequence
  Synthetically generated peptide
  misc_feature (13)..(13): Xaa can be Cys or D-Cys
CCEYCCTPACTGXY

SEQ ID NO: 81 - protein, 13 aa, Artificial Sequence
  Synthetically generated peptide
  misc_feature (5)..(5): Xaa can be Cys or D-Cys
CCEYXCNPACTGC

SEQ ID NO: 82 - protein, 14 aa, Artificial Sequence
  Synthetically generated peptide
  misc_feature (5)..(5): Xaa can be Cys or D-Cys
CCEYXCNPACTGCK

SEQ ID NO: 83 - protein, 14 aa, Artificial Sequence
  Synthetically generated peptide
  misc_feature (5)..(5): Xaa can be Cys or D-Cys
CCEYXCNPACTGCY

SEQ ID NO: 84 - protein, 13 aa, Artificial Sequence
  Synthetically generated peptide
  misc_feature (5)..(5): Xaa can be Cys or D-Cys
  misc_feature (13)..(13): Xaa can be Cys or D-Cys
CCEYXCNPACTGX

SEQ ID NO: 85 - protein, 14 aa, Artificial Sequence
  Synthetically generated peptide
  misc_feature (5)..(5): Xaa can be Cys or D-Cys
  misc_feature (13)..(13): Xaa can be Cys or D-Cys
CCEYXCNPACTGXK

SEQ ID NO: 86 - protein, 14 aa, Artificial Sequence
  Synthetically generated peptide
  misc_feature (5)..(5): Xaa can be Cys or D-Cys
  misc_feature (13)..(13): Xaa can be Cys or D-Cys
CCEYXCNPACTGXY

SEQ ID NO: 87 - protein, 13 aa, Artificial Sequence
  Synthetically generated peptide
  misc_feature (5)..(5): Xaa can be Cys or D-Cys
CCEYXCTPACTGC

SEQ ID NO: 88 - protein, 14 aa, Artificial Sequence
  Synthetically generated peptide
  misc_feature (5)..(5): Xaa can be Cys or D-Cys
CCEYXCTPACTGCK

SEQ ID NO: 89 - protein, 14 aa, Artificial Sequence
  Synthetically generated peptide
  misc_feature (5)..(5): Xaa can be Cys or D-Cys
CCEYXCTPACTGCY

SEQ ID NO: 90 - protein, 13 aa, Artificial Sequence
  Synthetically generated peptide
  misc_feature (5)..(5): Xaa can be Cys or D-Cys
  misc_feature (13)..(13): Xaa can be Cys or D-Cys
CCEYXCTPACTGX

SEQ ID NO: 91 - protein, 14 aa, Artificial Sequence
  Synthetically generated peptide
  misc_feature (5)..(5): Xaa can be Cys or D-Cys
  misc_feature (13)..(13): Xaa can be Cys or D-Cys
CCEYXCTPACTGXK

SEQ ID NO: 92 - protein, 14 aa, Artificial Sequence
  Synthetically generated peptide
  misc_feature (5)..(5): Xaa can be Cys or D-Cys
  misc_feature (13)..(13): Xaa can be Cys or D-Cys
CCEYXCTPACTGXY

SEQ ID NO: 93 - protein, 13 aa, Artificial Sequence
  Synthetically generated peptide
CCEFCCNPACTGC

SEQ ID NO: 94 - protein, 14 aa, Artificial Sequence
  Synthetically generated peptide
CCEFCCNPACTGCK

SEQ ID NO: 95 - protein, 14 aa, Artificial Sequence
  Synthetically generated peptide
CCEFCCNPACTGCY

SEQ ID NO: 96 - protein, 13 aa, Artificial Sequence
  Synthetically generated peptide
  misc_feature (13)..(13): Xaa can be Cys or D-Cys
CCEFCCNPACTGX

SEQ ID NO: 97 - protein, 14 aa, Artificial Sequence
  Synthetically generated peptide
  misc_feature (13)..(13): Xaa can be Cys or D-Cys
CCEFCCNPACTGXK

SEQ ID NO: 98 - protein, 14 aa, Artificial Sequence
  Synthetically generated peptide
  misc_feature (13)..(13): Xaa can be Cys or D-Cys
CCEFCCNPACTGXY

SEQ ID NO: 99 - protein, 13 aa, Artificial Sequence
  Synthetically generated peptide
CCEFCCTPACTGC

SEQ ID NO: 100 - protein, 14 aa, Artificial Sequence
  Synthetically generated peptide
CCEFCCTPACTGCK

SEQ ID NO: 101 - protein, 14 aa, Artificial Sequence
  Synthetically generated peptide
CCEFCCTPACTGCY

SEQ ID NO: 102 - protein, 13 aa, Artificial Sequence
  Synthetically generated peptide
  misc_feature (13)..(13): Xaa can be Cys or D-Cys
CCEFCCTPACTGX

SEQ ID NO: 103 - protein, 14 aa, Artificial Sequence
  Synthetically generated peptide
  misc_feature (13)..(13): Xaa can be Cys or D-Cys
CCEFCCTPACTGXK

SEQ ID NO: 104 - protein, 14 aa, Artificial Sequence
  Synthetically generated peptide
  misc_feature (13)..(13): Xaa can be Cys or D-Cys
CCEFCCTPACTGXY

SEQ ID NO: 105 - protein, 13 aa, Artificial Sequence
  Synthetically generated peptide
  misc_feature (5)..(5): Xaa can be Cys or D-Cys
CCEFXCNPACTGC

SEQ ID NO: 106 - protein, 14 aa, Artificial Sequence
  Synthetically generated peptide
  misc_feature (5)..(5): Xaa can be Cys or D-Cys
CCEFXCNPACTGCK

SEQ ID NO: 107 - protein, 14 aa, Artificial Sequence
  Synthetically generated peptide
  misc_feature (5)..(5): Xaa can be Cys or D-Cys
CCEFXCNPACTGCY

SEQ ID NO: 108 - protein, 13 aa, Artificial Sequence
  Synthetically generated peptide
  misc_feature (5)..(5): Xaa can be Cys or D-Cys
  misc_feature (13)..(13): Xaa can be Cys or D-Cys
CCEFXCNPACTGX

SEQ ID NO: 109 - protein, 14 aa, Artificial Sequence
  Synthetically generated peptide
  misc_feature (5)..(5): Xaa can be Cys or D-Cys
  misc_feature (13)..(13): Xaa can be Cys or D-Cys
CCEFXCNPACTGXK

SEQ ID NO: 110 - protein, 14 aa, Artificial Sequence
  Synthetically generated peptide
  misc_feature (5)..(5): Xaa can be Cys or D-Cys
  misc_feature (13)..(13): Xaa can be Cys or D-Cys
CCEFXCNPACTGXY

SEQ ID NO: 111 - protein, 13 aa, Artificial Sequence
  Synthetically generated peptide
  misc_feature (5)..(5): Xaa can be Cys or D-Cys
CCEFXCTPACTGC

SEQ ID NO: 112 - protein, 14 aa, Artificial Sequence
  Synthetically generated peptide
  misc_feature (5)..(5): Xaa can be Cys or D-Cys
CCEFXCTPACTGCK

SEQ ID NO: 113 - protein, 14 aa, Artificial Sequence
  Synthetically generated peptide
  misc_feature (5)..(5): Xaa can be Cys or D-Cys
CCEFXCTPACTGCY

SEQ ID NO: 114 - protein, 13 aa, Artificial Sequence
  Synthetically generated peptide
  misc_feature (5)..(5): Xaa can be Cys or D-Cys
  misc_feature (13)..(13): Xaa can be Cys or D-Cys
CCEFXCTPACTGX

SEQ ID NO: 115 - protein, 14 aa, Artificial Sequence
  Synthetically generated peptide
  misc_feature (5)..(5): Xaa can be Cys or D-Cys
  misc_feature (13)..(13): Xaa can be Cys or D-Cys
CCEFXCTPACTGXK

SEQ ID NO: 116 - protein, 14 aa, Artificial Sequence
  Synthetically generated peptide
  misc_feature (5)..(5): Xaa can be Cys or D-Cys
  misc_feature (13)..(13): Xaa can be Cys or D-Cys
CCEFXCTPACTGXY

SEQ ID NO: 117 - protein, 13 aa, Artificial Sequence
  Synthetically generated peptide
CCEWCCNPACTGC

SEQ ID NO: 118 - protein, 14 aa, Artificial Sequence
  Synthetically generated peptide
CCEWCCNPACTGCK

SEQ ID NO: 119 - protein, 14 aa, Artificial Sequence
  Synthetically generated peptide
CCEWCCNPACTGCY

SEQ ID NO: 120 - protein, 13 aa, Artificial Sequence
  Synthetically generated peptide
  misc_feature (13)..(13): Xaa can be Cys or D-Cys
CCEWCCNPACTGX

SEQ ID NO: 121 - protein, 14 aa, Artificial Sequence
  Synthetically generated peptide
  misc_feature (13)..(13): Xaa can be Cys or D-Cys
CCEWCCNPACTGXK

SEQ ID NO: 122 - protein, 14 aa, Artificial Sequence
  Synthetically generated peptide
  misc_feature (13)..(13): Xaa can be Cys or D-Cys
CCEWCCNPACTGXY

SEQ ID NO: 123 - protein, 13 aa, Artificial Sequence
  Synthetically generated peptide
CCEWCCTPACTGC

SEQ ID NO: 124 - protein, 14 aa, Artificial Sequence
  Synthetically generated peptide
CCEWCCTPACTGCK

SEQ ID NO: 125 - protein, 14 aa, Artificial Sequence
  Synthetically generated peptide
CCEWCCTPACTGCY

SEQ ID NO: 126 - protein, 13 aa, Artificial Sequence
  Synthetically generated peptide
  misc_feature (13)..(13): Xaa can be Cys or D-Cys
CCEWCCTPACTGX

SEQ ID NO: 127 - protein, 14 aa, Artificial Sequence
  Synthetically generated peptide
  misc_feature (13)..(13): Xaa can be Cys or D-Cys
CCEWCCTPACTGXK

SEQ ID NO: 128 - protein, 14 aa, Artificial Sequence
  Synthetically generated peptide
  misc_feature (13)..(13): Xaa can be Cys or D-Cys
CCEWCCTPACTGXY

SEQ ID NO: 129 - protein, 13 aa, Artificial Sequence
  Synthetically generated peptide
  misc_feature (5)..(5): Xaa can be Cys or D-Cys
CCEWXCNPACTGC

SEQ ID NO: 130 - protein, 14 aa, Artificial Sequence
  Synthetically generated peptide
  misc_feature (5)..(5): Xaa can be Cys or D-Cys
CCEWXCNPACTGCK

SEQ ID NO: 131 - protein, 14 aa, Artificial Sequence
  Synthetically generated peptide
  misc_feature (5)..(5): Xaa can be Cys or D-Cys
CCEWXCNPACTGCY

SEQ ID NO: 132 - protein, 13 aa, Artificial Sequence
  Synthetically generated peptide
  misc_feature (5)..(5): Xaa can be Cys or D-Cys
  misc_feature (13)..(13): Xaa can be Cys or D-Cys
CCEWXCNPACTGX

SEQ ID NO: 133 - protein, 14 aa, Artificial Sequence
  Synthetically generated peptide
  misc_feature (5)..(5): Xaa can be Cys or D-Cys
  misc_feature (13)..(13): Xaa can be Cys or D-Cys
CCEWXCNPACTGXK

SEQ ID NO: 134 - protein, 14 aa, Artificial Sequence
  Synthetically generated peptide
  misc_feature (5)..(5): Xaa can be Cys or D-Cys
  misc_feature (13)..(13): Xaa can be Cys or D-Cys
CCEWXCNPACTGXY

SEQ ID NO: 135 - protein, 13 aa, Artificial Sequence
  Synthetically generated peptide
  misc_feature (5)..(5): Xaa can be Cys or D-Cys
CCEWXCTPACTGC

SEQ ID NO: 136 - protein, 14 aa, Artificial Sequence
  Synthetically generated peptide
  misc_feature (5)..(5): Xaa can be Cys or D-Cys
CCEWXCTPACTGCK

SEQ ID NO: 137 - protein, 14 aa, Artificial Sequence
  Synthetically generated peptide
  misc_feature (5)..(5): Xaa can be Cys or D-Cys
CCEWXCTPACTGCY

SEQ ID NO: 138 - protein, 13 aa, Artificial Sequence
  Synthetically generated peptide
  misc_feature (5)..(5): Xaa can be Cys or D-Cys
  misc_feature (13)..(13): Xaa can be Cys or D-Cys
CCEWXCTPACTGX

SEQ ID NO: 139 - protein, 14 aa, Artificial Sequence
  Synthetically generated peptide
  misc_feature (5)..(5): Xaa can be Cys or D-Cys
  misc_feature (13)..(13): Xaa can be Cys or D-Cys
CCEWXCTPACTGXK

SEQ ID NO: 140 - protein, 14 aa, Artificial Sequence
  Synthetically generated peptide
  misc_feature (5)..(5): Xaa can be Cys or D-Cys
  misc_feature (13)..(13): Xaa can be Cys or D-Cys
CCEWXCTPACTGXY

SEQ ID NO: 141 - protein, 13 aa, Artificial Sequence
  Synthetically generated peptide
  misc_feature (1)..(1): Xaa can be Cys or D-Cys
XCEVCCNPACTGC

SEQ ID NO: 142 - protein, 14 aa, Artificial Sequence
  Synthetically generated peptide
  misc_feature (1)..(1): Xaa can be Cys or D-Cys
XCEVCCNPACTGCK

SEQ ID NO: 143 - protein, 14 aa, Artificial Sequence
  Synthetically generated peptide
  misc_feature (1)..(1): Xaa can be Cys or D-Cys
XCEVCCNPACTGCY

SEQ ID NO: 144 - protein, 13 aa, Artificial Sequence
  Synthetically generated peptide
  misc_feature (1)..(1): Xaa can be Cys or D-Cys
  misc_feature (13)..(13): Xaa can be Cys or D-Cys
XCEVCCNPACTGX

SEQ ID NO: 145 - protein, 14 aa, Artificial Sequence
  Synthetically generated peptide
  misc_feature (1)..(1): Xaa can be Cys or D-Cys
  misc_feature (13)..(13): Xaa can be Cys or D-Cys
XCEVCCNPACTGXK

SEQ ID NO: 146 - protein, 14 aa, Artificial Sequence
  Synthetically generated peptide
  misc_feature (1)..(1): Xaa can be Cys or D-Cys
  misc_feature (13)..(13): Xaa can be Cys or D-Cys
XCEVCCNPACTGXY

SEQ ID NO: 147 - protein, 13 aa, Artificial Sequence
  Synthetically generated peptide
  misc_feature (1)..(1): Xaa can be Cys or D-Cys
XCEVCCTPACTGC

SEQ ID NO: 148 - protein, 14 aa, Artificial Sequence
  Synthetically generated peptide
  misc_feature (1)..(1): Xaa can be Cys or D-Cys
XCEVCCTPACTGCK

SEQ ID NO: 149 - protein, 14 aa, Artificial Sequence
  Synthetically generated peptide
  misc_feature (1)..(1): Xaa can be Cys or D-Cys
XCEVCCTPACTGCY

SEQ ID NO: 150 - protein, 13 aa, Artificial Sequence
  Synthetically generated peptide
  misc_feature (1)..(1): Xaa can be Cys or D-Cys
  misc_feature (13)..(13): Xaa can be Cys or D-Cys
XCEVCCTPACTGX

SEQ ID NO: 151 - protein, 14 aa, Artificial Sequence
  Synthetically generated peptide
  misc_feature (1)..(1): Xaa can be Cys or D-Cys
  misc_feature (13)..(13): Xaa can be Cys or D-Cys
XCEVCCTPACTGXK

SEQ ID NO: 152 - protein, 14 aa, Artificial Sequence
  Synthetically generated peptide
  misc_feature (1)..(1): Xaa can be Cys or D-Cys
  misc_feature (13)..(13): Xaa can be Cys or D-Cys
XCEVCCTPACTGXY

SEQ ID NO: 153 - protein, 13 aa, Artificial Sequence
  Synthetically generated peptide
  misc_feature (1)..(1): Xaa can be Cys or D-Cys
  misc_feature (5)..(5): Xaa can be Cys or D-Cys
XCEVXCNPACTGC

SEQ ID NO: 154 - protein, 14 aa, Artificial Sequence
  Synthetically generated peptide
  misc_feature (1)..(1): Xaa can be Cys or D-Cys
  misc_feature (5)..(5): Xaa can be Cys or D-Cys
XCEVXCNPACTGCK

SEQ ID NO: 155 - protein, 14 aa, Artificial Sequence
  Synthetically generated peptide
  misc_feature (1)..(1): Xaa can be Cys or D-Cys
  misc_feature (5)..(5): Xaa can be Cys or D-Cys
XCEVXCNPACTGCY

SEQ ID NO: 156 - protein, 13 aa, Artificial Sequence
  Synthetically generated peptide
  misc_feature (1)..(1): Xaa can be Cys or D-Cys
  misc_feature (5)..(5): Xaa can be Cys or D-Cys
  misc_feature (13)..(13): Xaa can be Cys or D-Cys
XCEVXCNPACTGX

SEQ ID NO: 157 - protein, 14 aa, Artificial Sequence
  Synthetically generated peptide
  misc_feature (1)..(1): Xaa can be Cys or D-Cys
  misc_feature (5)..(5): Xaa can be Cys or D-Cys
  misc_feature (13)..(13): Xaa can be Cys or D-Cys
XCEVXCNPACTGXK

SEQ ID NO: 158 - protein, 14 aa, Artificial Sequence
  Synthetically generated peptide
  misc_feature (1)..(1): Xaa can be Cys or D-Cys
  misc_feature (5)..(5): Xaa can be Cys or D-Cys
  misc_feature (13)..(13): Xaa can be Cys or D-Cys
XCEVXCNPACTGXY

SEQ ID NO: 159 - protein, 13 aa, Artificial Sequence
  Synthetically generated peptide
  misc_feature (1)..(1): Xaa can be Cys or D-Cys
  misc_feature (5)..(5): Xaa can be Cys or D-Cys
XCEVXCTPACTGC

SEQ ID NO: 160 - protein, 14 aa, Artificial Sequence
  Synthetically generated peptide
  misc_feature (1)..(1): Xaa can be Cys or D-Cys
  misc_feature (5)..(5): Xaa can be Cys or D-Cys
XCEVXCTPACTGCK

SEQ ID NO: 161 - protein, 14 aa, Artificial Sequence
  Synthetically generated peptide
  misc_feature (1)..(1): Xaa can be Cys or D-Cys
  misc_feature (5)..(5): Xaa can be Cys or D-Cys
XCEVXCTPACTGCY

SEQ ID NO: 162 - protein, 13 aa, Artificial Sequence
  Synthetically generated peptide
  misc_feature (1)..(1): Xaa can be Cys or D-Cys
  misc_feature (5)..(5): Xaa can be Cys or D-Cys
  misc_feature (13)..(13): Xaa can be Cys or D-Cys
XCEVXCTPACTGX

SEQ ID NO: 163 - protein, 14 aa, Artificial Sequence
  Synthetically generated peptide
  misc_feature (1)..(1): Xaa can be Cys or D-Cys
  misc_feature (5)..(5): Xaa can be Cys or D-Cys
  misc_feature (13)..(13): Xaa can be Cys or D-Cys
XCEVXCTPACTGXK

SEQ ID NO: 164 - protein, 14 aa, Artificial Sequence
  Synthetically generated peptide
  misc_feature (1)..(1): Xaa can be Cys or D-Cys
  misc_feature (5)..(5): Xaa can be Cys or D-Cys
  misc_feature (13)..(13): Xaa can be Cys or D-Cys
XCEVXCTPACTGXY

SEQ ID NO: 165 - protein, 13 aa, Artificial Sequence
  Synthetically generated peptide
  misc_feature (1)..(1): Xaa can be Cys or D-Cys
XCEICCNPACTGC

SEQ ID NO: 166 - protein, 14 aa, Artificial Sequence
  Synthetically generated peptide
  misc_feature (1)..(1): Xaa can be Cys or D-Cys
XCEICCNPACTGCK

SEQ ID NO: 167 - protein, 14 aa, Artificial Sequence
  Synthetically generated peptide
  misc_feature (1)..(1): Xaa can be Cys or D-Cys
XCEICCNPACTGCY

SEQ ID NO: 168 - protein, 13 aa, Artificial Sequence
  Synthetically generated peptide
  misc_feature (1)..(1): Xaa can be Cys or D-Cys
  misc_feature (13)..(13): Xaa can be Cys or D-Cys
XCEICCNPACTGX

SEQ ID NO: 169 - protein, 14 aa, Artificial Sequence
  Synthetically generated peptide
  misc_feature (1)..(1): Xaa can be Cys or D-Cys
  misc_feature (13)..(13): Xaa can be Cys or D-Cys
XCEICCNPACTGXK

SEQ ID NO: 170 - protein, 14 aa, Artificial Sequence
  Synthetically generated peptide
  misc_feature (1)..(1): Xaa can be Cys or D-Cys
  misc_feature (13)..(13): Xaa can be Cys or D-Cys
XCEICCNPACTGXY

SEQ ID NO: 171 - protein, 13 aa, Artificial Sequence
  Synthetically generated peptide
  misc_feature (1)..(1): Xaa can be Cys or D-Cys
XCEICCTPACTGC

SEQ ID NO: 172 - protein, 14 aa, Artificial Sequence
  Synthetically generated peptide
  misc_feature (1)..(1): Xaa can be Cys or D-Cys
XCEICCTPACTGCK

SEQ ID NO: 173 - protein, 14 aa, Artificial Sequence
  Synthetically generated peptide
  misc_feature (1)..(1): Xaa can be Cys or D-Cys
XCEICCTPACTGCY

SEQ ID NO: 174 - protein, 13 aa, Artificial Sequence
  Synthetically generated peptide
  misc_feature (1)..(1): Xaa can be Cys or D-Cys
  misc_feature (13)..(13): Xaa can be Cys or D-Cys
XCEICCTPACTGX

SEQ ID NO: 175 - protein, 14 aa, Artificial Sequence
  Synthetically generated peptide
  misc_feature (1)..(1): Xaa can be Cys or D-Cys
  misc_feature (13)..(13): Xaa can be Cys or D-Cys
XCEICCTPACTGXK

SEQ ID NO: 176 - protein, 14 aa, Artificial Sequence
  Synthetically generated peptide
  misc_feature (1)..(1): Xaa can be Cys or D-Cys
  misc_feature (13)..(13): Xaa can be Cys or D-Cys
XCEICCTPACTGXY

SEQ ID NO: 177 - protein, 13 aa, Artificial Sequence
  Synthetically generated peptide
  misc_feature (1)..(1): Xaa can be Cys or D-Cys
  misc_feature (5)..(5): Xaa can be Cys or D-Cys
XCEIXCNPACTGC

SEQ ID NO: 178 - protein, 14 aa, Artificial Sequence
  Synthetically generated peptide
  misc_feature (1)..(1): Xaa can be Cys or D-Cys
  misc_feature (5)..(5): Xaa can be Cys or D-Cys
XCEIXCNPACTGCK

SEQ ID NO: 179 - protein, 14 aa, Artificial Sequence
  Synthetically generated peptide
  misc_feature (1)..(1): Xaa can be Cys or D-Cys
  misc_feature (5)..(5): Xaa can be Cys or D-Cys
XCEIXCNPACTGCY

SEQ ID NO: 180 - protein, 13 aa, Artificial Sequence
  Synthetically generated peptide
  misc_feature (1)..(1): Xaa can be Cys or D-Cys
  misc_feature (5)..(5): Xaa can be Cys or D-Cys
  misc_feature (13)..(13): Xaa can be Cys or D-Cys
XCEIXCNPACTGX

SEQ ID NO: 181 - protein, 14 aa, Artificial Sequence
  Synthetically generated peptide
  misc_feature (1)..(1): Xaa can be Cys or D-Cys
  misc_feature (5)..(5): Xaa can be Cys or D-Cys
  misc_feature (13)..(13): Xaa can be Cys or D-Cys
XCEIXCNPACTGXK

SEQ ID NO: 182 - protein, 14 aa, Artificial Sequence
  Synthetically generated peptide
  misc_feature (1)..(1): Xaa can be Cys or D-Cys
  misc_feature (5)..(5): Xaa can be Cys or D-Cys
  misc_feature (13)..(13): Xaa can be Cys or D-Cys
XCEIXCNPACTGXY

SEQ ID NO: 183 - protein, 13 aa, Artificial Sequence
  Synthetically generated peptide
  misc_feature (1)..(1): Xaa can be Cys or D-Cys
  misc_feature (5)..(5): Xaa can be Cys or D-Cys
XCEIXCTPACTGC

SEQ ID NO: 184 - protein, 14 aa, Artificial Sequence
  Synthetically generated peptide
  misc_feature (1)..(1): Xaa can be Cys or D-Cys
  misc_feature (5)..(5): Xaa can be Cys or D-Cys
XCEIXCTPACTGCK

SEQ ID NO: 185 - protein, 14 aa, Artificial Sequence
  Synthetically generated peptide
  misc_feature (1)..(1): Xaa can be Cys or D-Cys
  misc_feature (5)..(5): Xaa can be Cys or D-Cys
XCEIXCTPACTGCY

SEQ ID NO: 186 - protein, 13 aa, Artificial Sequence
  Synthetically generated peptide
  misc_feature (1)..(1): Xaa can be Cys or D-Cys
  misc_feature (5)..(5): Xaa can be Cys or D-Cys
  misc_feature (13)..(13): Xaa can be Cys or D-Cys
XCEIXCTPACTGX

SEQ ID NO: 187 - protein, 14 aa, Artificial Sequence
  Synthetically generated peptide
  misc_feature (1)..(1): Xaa can be Cys or D-Cys
  misc_feature (5)..(5): Xaa can be Cys or D-Cys
  misc_feature (13)..(13): Xaa can be Cys or D-Cys
XCEIXCTPACTGXK

SEQ ID NO: 188 - protein, 14 aa, Artificial Sequence
  Synthetically generated peptide
  misc_feature (1)..(1): Xaa can be Cys or D-Cys
  misc_feature (5)..(5): Xaa can be Cys or D-Cys
  misc_feature (13)..(13): Xaa can be Cys or D-Cys
XCEIXCTPACTGXY

SEQ ID NO: 189 - protein, 13 aa, Artificial Sequence
  Synthetically generated peptide
  misc_feature (1)..(1): Xaa can be Cys or D-Cys
XCELCCNPACTGC

SEQ ID NO: 190 - protein, 14 aa, Artificial Sequence
  Synthetically generated peptide
  misc_feature (1)..(1): Xaa can be Cys or D-Cys
XCELCCNPACTGCK

SEQ ID NO: 191 - protein, 14 aa, Artificial Sequence
  Synthetically generated peptide
  misc_feature (1)..(1): Xaa can be Cys or D-Cys
XCELCCNPACTGCY

SEQ ID NO: 192 - protein, 13 aa, Artificial Sequence
  Synthetically generated peptide
  misc_feature (1)..(1): Xaa can be Cys or D-Cys
  misc_feature (13)..(13): Xaa can be Cys or D-Cys
XCELCCNPACTGX

SEQ ID NO: 193 - protein, 14 aa, Artificial Sequence
  Synthetically generated peptide
  misc_feature (1)..(1): Xaa can be Cys or D-Cys
  misc_feature (13)..(13): Xaa can be Cys or D-Cys
XCELCCNPACTGXK

SEQ ID NO: 194 - protein, 14 aa, Artificial Sequence
  Synthetically generated peptide
  misc_feature (1)..(1): Xaa can be Cys or D-Cys
  misc_feature (13)..(13): Xaa can be Cys or D-Cys
XCELCCNPACTGXY

SEQ ID NO: 195 - protein, 13 aa, Artificial Sequence
  Synthetically generated peptide
  misc_feature (1)..(1): Xaa can be Cys or D-Cys
XCELCCTPACTGC

SEQ ID NO: 196 - protein, 14 aa, Artificial Sequence
  Synthetically generated peptide
  misc_feature (1)..(1): Xaa can be Cys or D-Cys
XCELCCTPACTGCK

SEQ ID NO: 197 - protein, 14 aa, Artificial Sequence
  Synthetically generated peptide
  misc_feature (1)..(1): Xaa can be Cys or D-Cys
XCELCCTPACTGCY

SEQ ID NO: 198 - protein, 13 aa, Artificial Sequence
  Synthetically generated peptide
  misc_feature (1)..(1): Xaa can be Cys or D-Cys
  misc_feature (13)..(13): Xaa can be Cys or D-Cys
XCELCCTPACTGX

SEQ ID NO: 199 - protein, 14 aa, Artificial Sequence
  Synthetically generated peptide
  misc_feature (1)..(1): Xaa can be Cys or D-Cys
  misc_feature (13)..(13): Xaa can be Cys or D-Cys
XCELCCTPACTGXK

SEQ ID NO: 200 - protein, 14 aa, Artificial Sequence
  Synthetically generated peptide
  misc_feature (1)..(1): Xaa can be Cys or D-Cys
  misc_feature (13)..(13): Xaa can be Cys or D-Cys
XCELCCTPACTGXY

SEQ ID NO: 201 - protein, 13 aa, Artificial Sequence
  Synthetically generated peptide
  misc_feature (1)..(1): Xaa can be Cys or D-Cys
  misc_feature (5)..(5): Xaa can be Cys or D-Cys
XCELXCNPACTGC

SEQ ID NO: 202 - protein, 14 aa, Artificial Sequence
  Synthetically generated peptide
  misc_feature (1)..(1): Xaa can be Cys or D-Cys
  misc_feature (5)..(5): Xaa can be Cys or D-Cys
XCELXCNPACTGCK

SEQ ID NO: 203 - protein, 14 aa, Artificial Sequence
  Synthetically generated peptide
  misc_feature (1)..(1): Xaa can be Cys or D-Cys
  misc_feature (5)..(5): Xaa can be Cys or D-Cys
XCELXCNPACTGCY

SEQ ID NO: 204 - protein, 13 aa, Artificial Sequence
  Synthetically generated peptide
  misc_feature (1)..(1): Xaa can be Cys or D-Cys
  misc_feature (5)..(5): Xaa can be Cys or D-Cys
  misc_feature (13)..(13): Xaa can be Cys or D-Cys
XCELXCNPACTGX

SEQ ID NO: 205 - protein, 14 aa, Artificial Sequence
  Synthetically generated peptide
  misc_feature (1)..(1): Xaa can be Cys or D-Cys
  misc_feature (5)..(5): Xaa can be Cys or D-Cys
  misc_feature (13)..(13): Xaa can be Cys or D-Cys
XCELXCNPACTGXK

SEQ ID NO: 206 - protein, 14 aa, Artificial Sequence
  Synthetically generated peptide
  misc_feature (1)..(1): Xaa can be Cys or D-Cys
  misc_feature (5)..(5): Xaa can be Cys or D-Cys
  misc_feature (13)..(13): Xaa can be Cys or D-Cys
XCELXCNPACTGXY

SEQ ID NO: 207 - protein, 13 aa, Artificial Sequence
  Synthetically generated peptide
  misc_feature (1)..(1): Xaa can be Cys or D-Cys
  misc_feature (5)..(5): Xaa can be Cys or D-Cys
XCELXCTPACTGC

SEQ ID NO: 208 - protein, 14 aa, Artificial Sequence
  Synthetically generated peptide
  misc_feature (1)..(1): Xaa can be Cys or D-Cys
  misc_feature (5)..(5): Xaa can be Cys or D-Cys
XCELXCTPACTGCK

SEQ ID NO: 209 - protein, 14 aa, Artificial Sequence
  Synthetically generated peptide
  misc_feature (1)..(1): Xaa can be Cys or D-Cys
  misc_feature (5)..(5): Xaa can be Cys or D-Cys
XCELXCTPACTGCY

SEQ ID NO: 210 - protein, 13 aa, Artificial Sequence
  Synthetically generated peptide
  misc_feature (1)..(1): Xaa can be Cys or D-Cys
  misc_feature (5)..(5): Xaa can be Cys or D-Cys
  misc_feature (13)..(13): Xaa can be Cys or D-Cys
XCELXCTPACTGX

SEQ ID NO: 211 - protein, 14 aa, Artificial Sequence
  Synthetically generated peptide
  misc_feature (1)..(1): Xaa can be Cys or D-Cys
  misc_feature (5)..(5): Xaa can be Cys or D-Cys
  misc_feature (13)..(13): Xaa can be Cys or D-Cys
XCELXCTPACTGXK

SEQ ID NO: 212 - protein, 14 aa, Artificial Sequence
  Synthetically generated peptide
  misc_feature (1)..(1): Xaa can be Cys or D-Cys
  misc_feature (5)..(5): Xaa can be Cys or D-Cys
  misc_feature (13)..(13): Xaa can be Cys or D-Cys
XCELXCTPACTGXY

SEQ ID NO: 213 - protein, 13 aa, Artificial Sequence
  Synthetically generated peptide
  misc_feature (1)..(1): Xaa can be Cys or D-Cys
XCEYCCNPACTGC

SEQ ID NO: 214 - protein, 14 aa, Artificial Sequence
  Synthetically generated peptide
  misc_feature (1)..(1): Xaa can be Cys or D-Cys
XCEYCCNPACTGCK

SEQ ID NO: 215 - protein, 14 aa, Artificial Sequence
  Synthetically generated peptide
  misc_feature (1)..(1): Xaa can be Cys or D-Cys
XCEYCCNPACTGCY

SEQ ID NO: 216 - protein, 13 aa, Artificial Sequence
  Synthetically generated peptide
  misc_feature (1)..(1): Xaa can be Cys or D-Cys
  misc_feature (13)..(13): Xaa can be Cys or D-Cys
XCEYCCNPACTGX

SEQ ID NO: 217 - protein, 14 aa, Artificial Sequence
  Synthetically generated peptide
  misc_feature (1)..(1): Xaa can be Cys or D-Cys
  misc_feature (13)..(13): Xaa can be Cys or D-Cys
XCEYCCNPACTGXK

SEQ ID NO: 218 - protein, 14 aa, Artificial Sequence
  Synthetically generated peptide
  misc_feature (1)..(1): Xaa can be Cys or D-Cys
  misc_feature (13)..(13): Xaa can be Cys or D-Cys
XCEYCCNPACTGXY

SEQ ID NO: 219 - protein, 13 aa, Artificial Sequence
  Synthetically generated peptide
  misc_feature (1)..(1): Xaa can be Cys or D-Cys
XCEYCCTPACTGC

SEQ ID NO: 220 - protein, 14 aa, Artificial Sequence
  Synthetically generated peptide
  misc_feature (1)..(1): Xaa can be Cys or D-Cys
XCEYCCTPACTGCK

SEQ ID NO: 221 - protein, 14 aa, Artificial Sequence
  Synthetically generated peptide
  misc_feature (1)..(1): Xaa can be Cys or D-Cys
XCEYCCTPACTGCY

SEQ ID NO: 222 - protein, 13 aa, Artificial Sequence
  Synthetically generated peptide
  misc_feature (1)..(1): Xaa can be Cys or D-Cys
  misc_feature (13)..(13): Xaa can be Cys or D-Cys
XCEYCCTPACTGX

SEQ ID NO: 223 - protein, 14 aa, Artificial Sequence
  Synthetically generated peptide
  misc_feature (1)..(1): Xaa can be Cys or D-Cys
  misc_feature (13)..(13): Xaa can be Cys or D-Cys
XCEYCCTPACTGXK

SEQ ID NO: 224 - protein, 14 aa, Artificial Sequence
  Synthetically generated peptide
  misc_feature (1)..(1): Xaa can be Cys or D-Cys
  misc_feature (13)..(13): Xaa can be Cys or D-Cys
XCEYCCTPACTGXY

SEQ ID NO: 225 - protein, 13 aa, Artificial Sequence
  Synthetically generated peptide
  misc_feature (1)..(1): Xaa can be Cys or D-Cys
  misc_feature (5)..(5): Xaa can be Cys or D-Cys
XCEYXCNPACTGC

SEQ ID NO: 226 - protein, 14 aa, Artificial Sequence
  Synthetically generated peptide
  misc_feature (1)..(1): Xaa can be Cys or D-Cys
  misc_feature (5)..(5): Xaa can be Cys or D-Cys
XCEYXCNPACTGCK

SEQ ID NO: 227 - protein, 14 aa, Artificial Sequence
  Synthetically generated peptide
  misc_feature (1)..(1): Xaa can be Cys or D-Cys
  misc_feature (5)..(5): Xaa can be Cys or D-Cys
XCEYXCNPACTGCY

SEQ ID NO: 228 - protein, 13 aa, Artificial Sequence
  Synthetically generated peptide
  misc_feature (1)..(1): Xaa can be Cys or D-Cys
  misc_feature (5)..(5): Xaa can be Cys or D-Cys
  misc_feature (13)..(13): Xaa can be Cys or D-Cys
XCEYXCNPACTGX

SEQ ID NO: 229 - protein, 14 aa, Artificial Sequence
  Synthetically generated peptide
  misc_feature (1)..(1): Xaa can be Cys or D-Cys
  misc_feature (5)..(5): Xaa can be Cys or D-Cys
  misc_feature (13)..(13): Xaa can be Cys or D-Cys
XCEYXCNPACTGXK

SEQ ID NO: 230 - protein, 14 aa, Artificial Sequence
  Synthetically generated peptide
  misc_feature (1)..(1): Xaa can be Cys or D-Cys
  misc_feature (5)..(5): Xaa can be Cys or D-Cys
  misc_feature (13)..(13): Xaa can be Cys or D-Cys
XCEYXCNPACTGXY

SEQ ID NO: 231 - protein, 13 aa, Artificial Sequence
  Synthetically generated peptide
  misc_feature (1)..(1): Xaa can be Cys or D-Cys
  misc_feature (5)..(5): Xaa can be Cys or D-Cys
XCEYXCTPACTGC

SEQ ID NO: 232 - protein, 14 aa, Artificial Sequence
  Synthetically generated peptide
  misc_feature (1)..(1): Xaa can be Cys or D-Cys
  misc_feature (5)..(5): Xaa can be Cys or D-Cys
XCEYXCTPACTGCK

SEQ ID NO: 233 - protein, 14 aa, Artificial Sequence
  Synthetically generated peptide
  misc_feature (1)..(1): Xaa can be Cys or D-Cys
  misc_feature (5)..(5): Xaa can be Cys or D-Cys
XCEYXCTPACTGCY

SEQ ID NO: 234 - protein, 13 aa, Artificial Sequence
  Synthetically generated peptide
  misc_feature (1)..(1): Xaa can be Cys or D-Cys
  misc_feature (5)..(5): Xaa can be Cys or D-Cys
  misc_feature (13)..(13): Xaa can be Cys or D-Cys
XCEYXCTPACTGX

SEQ ID NO: 235 - protein, 14 aa, Artificial Sequence
  Synthetically generated peptide
  misc_feature (1)..(1): Xaa can be Cys or D-Cys
  misc_feature (5)..(5): Xaa can be Cys or D-Cys
  misc_feature (13)..(13): Xaa can be Cys or D-Cys
XCEYXCTPACTGXK

SEQ ID NO: 236 - protein, 14 aa, Artificial Sequence
  Synthetically generated peptide
  misc_feature (1)..(1): Xaa can be Cys or D-Cys
  misc_feature (5)..(5): Xaa can be Cys or D-Cys
  misc_feature (13)..(13): Xaa can be Cys or D-Cys
XCEYXCTPACTGXY

SEQ ID NO: 237 - protein, 13 aa, Artificial Sequence
  Synthetically generated peptide
  misc_feature (1)..(1): Xaa can be Cys or D-Cys
XCEFCCNPACTGC

SEQ ID NO: 238 - protein, 14 aa, Artificial Sequence
  Synthetically generated peptide
  misc_feature (1)..(1): Xaa can be Cys or D-Cys
XCEFCCNPACTGCK

SEQ ID NO: 239 - protein, 14 aa, Artificial Sequence
  Synthetically generated peptide
  misc_feature (1)..(1): Xaa can be Cys or D-Cys
XCEFCCNPACTGCY

SEQ ID NO: 240 - protein, 13 aa, Artificial Sequence
  Synthetically generated peptide
  misc_feature (1)..(1): Xaa can be Cys or D-Cys
  misc_feature (13)..(13): Xaa can be Cys or D-Cys
XCEFCCNPACTGX

SEQ ID NO: 241 - protein, 14 aa, Artificial Sequence
  Synthetically generated peptide
  misc_feature (1)..(1): Xaa can be Cys or D-Cys
  misc_feature (13)..(13): Xaa can be Cys or D-Cys
XCEFCCNPACTGXK

SEQ ID NO: 242 - protein, 14 aa, Artificial Sequence
  Synthetically generated peptide
  misc_feature (1)..(1): Xaa can be Cys or D-Cys
  misc_feature (13)..(13): Xaa can be Cys or D-Cys
XCEFCCNPACTGXY

SEQ ID NO: 243 - protein, 13 aa, Artificial Sequence
  Synthetically generated peptide
  misc_feature (1)..(1): Xaa can be Cys or D-Cys
XCEFCCTPACTGC

SEQ ID NO: 244 - protein, 14 aa, Artificial Sequence
  Synthetically generated peptide
  misc_feature (1)..(1): Xaa can be Cys or D-Cys
XCEFCCTPACTGCK

SEQ ID NO: 245 - protein, 14 aa, Artificial Sequence
  Synthetically generated peptide
  misc_feature (1)..(1): Xaa can be Cys or D-Cys
XCEFCCTPACTGCY

SEQ ID NO: 246 - protein, 13 aa, Artificial Sequence
  Synthetically generated peptide
  misc_feature (1)..(1): Xaa can be Cys or D-Cys
  misc_feature (13)..(13): Xaa can be Cys or D-Cys
XCEFCCTPACTGX

SEQ ID NO: 247 - protein, 14 aa, Artificial Sequence
  Synthetically generated peptide
  misc_feature (1)..(1): Xaa can be Cys or D-Cys
  misc_feature (13)..(13): Xaa can be Cys or D-Cys
XCEFCCTPACTGXK

SEQ ID NO: 248 - protein, 14 aa, Artificial Sequence
  Synthetically generated peptide
  misc_feature (1)..(1): Xaa can be Cys or D-Cys
  misc_feature (13)..(13): Xaa can be Cys or D-Cys
XCEFCCTPACTGXY

SEQ ID NO: 249 - protein, 13 aa, Artificial Sequence
  Synthetically generated peptide
  misc_feature (1)..(1): Xaa can be Cys or D-Cys
  misc_feature (5)..(5): Xaa can be Cys or D-Cys
XCEFXCNPACTGC

SEQ ID NO: 250 - protein, 14 aa, Artificial Sequence
  Synthetically generated peptide
  misc_feature (1)..(1): Xaa can be Cys or D-Cys
  misc_feature (5)..(5): Xaa can be Cys or D-Cys
XCEFXCNPACTGCK

SEQ ID NO: 251 - protein, 14 aa, Artificial Sequence
  Synthetically generated peptide
  misc_feature (1)..(1): Xaa can be Cys or D-Cys
  misc_feature (5)..(5): Xaa can be Cys or D-Cys
XCEFXCNPACTGCY

SEQ ID NO: 252 - protein, 13 aa, Artificial Sequence
  Synthetically generated peptide
  misc_feature (1)..(1): Xaa can be Cys or D-Cys
  misc_feature (5)..(5): Xaa can be Cys or D-Cys
  misc_feature (13)..(13): Xaa can be Cys or D-Cys
XCEFXCNPACTGX

SEQ ID NO: 253 - protein, 14 aa, Artificial Sequence
  Synthetically generated peptide
  misc_feature (1)..(1): Xaa can be Cys or D-Cys
  misc_feature (5)..(5): Xaa can be Cys or D-Cys
  misc_feature (13)..(13): Xaa can be Cys or D-Cys
XCEFXCNPACTGXK

SEQ ID NO: 254 - protein, 14 aa, Artificial Sequence
  Synthetically generated peptide
  misc_feature (1)..(1): Xaa can be Cys or D-Cys
  misc_feature (5)..(5): Xaa can be Cys or D-Cys
  misc_feature (13)..(13): Xaa can be Cys or D-Cys
XCEFXCNPACTGXY

SEQ ID NO: 255 - protein, 13 aa, Artificial Sequence
  Synthetically generated peptide
  misc_feature (1)..(1): Xaa can be Cys or D-Cys
  misc_feature (5)..(5): Xaa can be Cys or D-Cys
XCEFXCTPACTGC

SEQ ID NO: 256 - protein, 14 aa, Artificial Sequence
  Synthetically generated peptide
  misc_feature (1)..(1): Xaa can be Cys or D-Cys
  misc_feature (5)..(5): Xaa can be Cys or D-Cys
XCEFXCTPACTGCK

SEQ ID NO: 257 - protein, 14 aa, Artificial Sequence
  Synthetically generated peptide
  misc_feature (1)..(1): Xaa can be Cys or D-Cys
  misc_feature (5)..(5): Xaa can be Cys or D-Cys
XCEFXCTPACTGCY

SEQ ID NO: 258 - protein, 13 aa, Artificial Sequence
  Synthetically generated peptide
  misc_feature (1)..(1): Xaa can be Cys or D-Cys
  misc_feature (5)..(5): Xaa can be Cys or D-Cys
  misc_feature (13)..(13): Xaa can be Cys or D-Cys
XCEFXCTPACTGX

SEQ ID NO: 259 - protein, 14 aa, Artificial Sequence
  Synthetically generated peptide
  misc_feature (1)..(1): Xaa can be Cys or D-Cys
  misc_feature (5)..(5): Xaa can be Cys or D-Cys
  misc_feature (13)..(13): Xaa can be Cys or D-Cys
XCEFXCTPACTGXK

SEQ ID NO: 260 - protein, 14 aa, Artificial Sequence
  Synthetically generated peptide
  misc_feature (1)..(1): Xaa can be Cys or D-Cys
  misc_feature (5)..(5): Xaa can be Cys or D-Cys
  misc_feature (13)..(13): Xaa can be Cys or D-Cys
XCEFXCTPACTGXY

SEQ ID NO: 261 - protein, 13 aa, Artificial Sequence
  Synthetically generated peptide
  misc_feature (1)..(1): Xaa can be Cys or D-Cys
XCEWCCNPACTGC

SEQ ID NO: 262 - protein, 14 aa, Artificial Sequence
  Synthetically generated peptide
  misc_feature (1)..(1): Xaa can be Cys or D-Cys
XCEWCCNPACTGCK

SEQ ID NO: 263 - protein, 14 aa, Artificial Sequence
  Synthetically generated peptide
  misc_feature (1)..(1): Xaa can be Cys or D-Cys
XCEWCCNPACTGCY

SEQ ID NO: 264 - protein, 13 aa, Artificial Sequence
  Synthetically generated peptide
  misc_feature (1)..(1): Xaa can be Cys or D-Cys
  misc_feature (13)..(13): Xaa can be Cys or D-Cys
XCEWCCNPACTGX

SEQ ID NO: 265 - protein, 14 aa, Artificial Sequence
  Synthetically generated peptide
  misc_feature (1)..(1): Xaa can be Cys or D-Cys
  misc_feature (13)..(13): Xaa can be Cys or D-Cys
XCEWCCNPACTGXK

SEQ ID NO: 266 - protein, 14 aa, Artificial Sequence
  Synthetically generated peptide
  misc_feature (1)..(1): Xaa can be Cys or D-Cys
  misc_feature (13)..(13): Xaa can be Cys or D-Cys
XCEWCCNPACTGXY

SEQ ID NO: 267 - protein, 13 aa, Artificial Sequence
  Synthetically generated peptide
  misc_feature (1)..(1): Xaa can be Cys or D-Cys
XCEWCCTPACTGC

SEQ ID NO: 268 - protein, 14 aa, Artificial Sequence
  Synthetically generated peptide
  misc_feature (1)..(1): Xaa can be Cys or D-Cys
XCEWCCTPACTGCK

SEQ ID NO: 269 - protein, 14 aa, Artificial Sequence
  Synthetically generated peptide
  misc_feature (1)..(1): Xaa can be Cys or D-Cys
XCEWCCTPACTGCY

SEQ ID NO: 270 - protein, 13 aa, Artificial Sequence
  Synthetically generated peptide
  misc_feature (1)..(1): Xaa can be Cys or D-Cys
  misc_feature (13)..(13): Xaa can be Cys or D-Cys
XCEWCCTPACTGX

SEQ ID NO: 271 - protein, 14 aa, Artificial Sequence
  Synthetically generated peptide
  misc_feature (1)..(1): Xaa can be Cys or D-Cys
  misc_feature (13)..(13): Xaa can be Cys or D-Cys
XCEWCCTPACTGXK

SEQ ID NO: 272 - protein, 14 aa, Artificial Sequence
  Synthetically generated peptide
  misc_feature (1)..(1): Xaa can be Cys or D-Cys
  misc_feature (13)..(13): Xaa can be Cys or D-Cys
XCEWCCTPACTGXY

SEQ ID NO: 273 - protein, 13 aa, Artificial Sequence
  Synthetically generated peptide
  misc_feature (1)..(1): Xaa can be Cys or D-Cys
  misc_feature (5)..(5): Xaa can be Cys or D-Cys
XCEWXCNPACTGC

SEQ ID NO: 274 - protein, 14 aa, Artificial Sequence
  Synthetically generated peptide
  misc_feature (1)..(1): Xaa can be Cys or D-Cys
  misc_feature (5)..(5): Xaa can be Cys or D-Cys
XCEWXCNPACTGCK

SEQ ID NO: 275 - protein, 14 aa, Artificial Sequence
  Synthetically generated peptide
  misc_feature (1)..(1): Xaa can be Cys or D-Cys
  misc_feature (5)..(5): Xaa can be Cys or D-Cys
XCEWXCNPACTGCY

SEQ ID NO: 276 - protein, 13 aa, Artificial Sequence
  Synthetically generated peptide
  misc_feature (1)..(1): Xaa can be Cys or D-Cys
  misc_feature (5)..(5): Xaa can be Cys or D-Cys
  misc_feature (13)..(13): Xaa can be Cys or D-Cys
XCEWXCNPACTGX

SEQ ID NO: 277 - protein, 14 aa, Artificial Sequence
  Synthetically generated peptide
  misc_feature (1)..(1): Xaa can be Cys or D-Cys
  misc_feature (5)..(5): Xaa can be Cys or D-Cys
  misc_feature (13)..(13): Xaa can be Cys or D-Cys
XCEWXCNPACTGXK

SEQ ID NO: 278 - protein, 14 aa, Artificial Sequence
  Synthetically generated peptide
  misc_feature (1)..(1): Xaa can be Cys or D-Cys
  misc_feature (5)..(5): Xaa can be Cys or D-Cys
  misc_feature (13)..(13): Xaa can be Cys or D-Cys
XCEWXCNPACTGXY

SEQ ID NO: 279 - protein, 13 aa, Artificial Sequence
  Synthetically generated peptide
  misc_feature (1)..(1): Xaa can be Cys or D-Cys
  misc_feature (5)..(5): Xaa can be Cys or D-Cys
XCEWXCTPACTGC

SEQ ID NO: 280 - protein, 14 aa, Artificial Sequence
  Synthetically generated peptide
  misc_feature (1)..(1): Xaa can be Cys or D-Cys
  misc_feature (5)..(5): Xaa can be Cys or D-Cys
XCEWXCTPACTGCK

SEQ ID NO: 281 - protein, 14 aa, Artificial Sequence
  Synthetically generated peptide
  misc_feature (1)..(1): Xaa can be Cys or D-Cys
  misc_feature (5)..(5): Xaa can be Cys or D-Cys
XCEWXCTPACTGCY

SEQ ID NO: 282 - protein, 13 aa, Artificial Sequence
  Synthetically generated peptide
  misc_feature (1)..(1): Xaa can be Cys or D-Cys
  misc_feature (5)..(5): Xaa can be Cys or D-Cys
  misc_feature (13)..(13): Xaa can be Cys or D-Cys
XCEWXCTPACTGX

SEQ ID NO: 283 - protein, 14 aa, Artificial Sequence
  Synthetically generated peptide
  misc_feature (1)..(1): Xaa can be Cys or D-Cys
  misc_feature (5)..(5): Xaa can be Cys or D-Cys
  misc_feature (13)..(13): Xaa can be Cys or D-Cys
XCEWXCTPACTGXK

SEQ ID NO: 284 - protein, 14 aa, Artificial Sequence
  Synthetically generated peptide
  misc_feature (1)..(1): Xaa can be Cys or D-Cys
  misc_feature (5)..(5): Xaa can be Cys or D-Cys
  misc_feature (13)..(13): Xaa can be Cys or D-Cys
XCEWXCTPACTGXY

SEQ ID NO: 285 - protein, 14 aa, Artificial Sequence
  Synthetically generated peptide
ACCEVCCNPACTGC

SEQ ID NO: 286 - protein, 15 aa, Artificial Sequence
  Synthetically generated peptide
ACCEVCCNPACTGCK

SEQ ID NO: 287 - protein, 15 aa, Artificial Sequence
  Synthetically generated peptide
ACCEVCCNPACTGCY

SEQ ID NO: 288 - protein, 14 aa, Artificial Sequence
  Synthetically generated peptide
  misc_feature (14)..(14): Xaa can be Cys or D-Cys
ACCEVCCNPACTGX

SEQ ID NO: 289 - protein, 15 aa, Artificial Sequence
  Synthetically generated peptide
  misc_feature (14)..(14): Xaa can be Cys or D-Cys
ACCEVCCNPACTGXK

SEQ ID NO: 290 - protein, 15 aa, Artificial Sequence
  Synthetically generated peptide
  misc_feature (14)..(14): Xaa can be Cys or D-Cys
ACCEVCCNPACTGXY

SEQ ID NO: 291 - protein, 14 aa, Artificial Sequence
  Synthetically generated peptide
ACCEVCCTPACTGC

SEQ ID NO: 292 - protein, 15 aa, Artificial Sequence
  Synthetically generated peptide
ACCEVCCTPACTGCK

SEQ ID NO: 293 - protein, 15 aa, Artificial Sequence
  Synthetically generated peptide
ACCEVCCTPACTGCY

SEQ ID NO: 294 - protein, 14 aa, Artificial Sequence
  Synthetically generated peptide
  misc_feature (14)..(14): Xaa can be Cys or D-Cys
ACCEVCCTPACTGX

SEQ ID NO: 295 - protein, 15 aa, Artificial Sequence
  Synthetically generated peptide
  misc_feature (14)..(14): Xaa can be Cys or D-Cys
ACCEVCCTPACTGXK

SEQ ID NO: 296 - protein, 15 aa, Artificial Sequence
  Synthetically generated peptide
  misc_feature (14)..(14): Xaa can be Cys or D-Cys
ACCEVCCTPACTGXY

SEQ ID NO: 297 - protein, 14 aa, Artificial Sequence
  Synthetically generated peptide
  misc_feature (6)..(6): Xaa can be Cys or D-Cys
ACCEVXCNPACTGC

SEQ ID NO: 298 - protein, 15 aa, Artificial Sequence
  Synthetically generated peptide
  misc_feature (6)..(6): Xaa can be Cys or D-Cys
ACCEVXCNPACTGCK

SEQ ID NO: 299 - protein, 15 aa, Artificial Sequence
  Synthetically generated peptide
  misc_feature (6)..(6): Xaa can be Cys or D-Cys
ACCEVXCNPACTGCY

SEQ ID NO: 300 - protein, 14 aa, Artificial Sequence
  Synthetically generated peptide
  misc_feature (6)..(6): Xaa can be Cys or D-Cys
  misc_feature (14)..(14): Xaa can be Cys or D-Cys
ACCEVXCNPACTGX

SEQ ID NO: 301 - protein, 15 aa, Artificial Sequence
  Synthetically generated peptide
  misc_feature (6)..(6): Xaa can be Cys or D-Cys
  misc_feature (14)..(14): Xaa can be Cys or D-Cys
ACCEVXCNPACTGXK

SEQ ID NO: 302 - protein, 15 aa, Artificial Sequence
  Synthetically generated peptide
  misc_feature (6)..(6): Xaa can be Cys or D-Cys
  misc_feature (14)..(14): Xaa can be Cys or D-Cys
ACCEVXCNPACTGXY

SEQ ID NO: 303 - protein, 14 aa, Artificial Sequence
  Synthetically generated peptide
  misc_feature (6)..(6): Xaa can be Cys or D-Cys
ACCEVXCTPACTGC

SEQ ID NO: 304 - protein, 15 aa, Artificial Sequence
  Synthetically generated peptide
  misc_feature (6)..(6): Xaa can be Cys or D-Cys
ACCEVXCTPACTGCK

SEQ ID NO: 305 - protein, 15 aa, Artificial Sequence
  Synthetically generated peptide
  misc_feature (6)..(6): Xaa can be Cys or D-Cys
ACCEVXCTPACTGCY

SEQ ID NO: 306 - protein, 14 aa, Artificial Sequence
  Synthetically generated peptide
  misc_feature (6)..(6): Xaa can be Cys or D-Cys
  misc_feature (14)..(14): Xaa can be Cys or D-Cys
ACCEVXCTPACTGX

SEQ ID NO: 307 - protein, 15 aa, Artificial Sequence
  Synthetically generated peptide
  misc_feature (6)..(6): Xaa can be Cys or D-Cys
  misc_feature (14)..(14): Xaa can be Cys or D-Cys
ACCEVXCTPACTGXK

SEQ ID NO: 308 - protein, 15 aa, Artificial Sequence
  Synthetically generated peptide
  misc_feature (6)..(6): Xaa can be Cys or D-Cys
  misc_feature (14)..(14): Xaa can be Cys or D-Cys
ACCEVXCTPACTGXY

SEQ ID NO: 309 - protein, 14 aa, Artificial Sequence
  Synthetically generated peptide
ACCEICCNPACTGC

SEQ ID NO: 310 - protein, 15 aa, Artificial Sequence
  Synthetically generated peptide
ACCEICCNPACTGCK

SEQ ID NO: 311 - protein, 15 aa, Artificial Sequence
  Synthetically generated peptide
ACCEICCNPACTGCY

SEQ ID NO: 312 - protein, 14 aa, Artificial Sequence
  Synthetically generated peptide
  misc_feature (14)..(14): Xaa can be Cys or D-Cys
ACCEICCNPACTGX

SEQ ID NO: 313 - protein, 15 aa, Artificial Sequence
  Synthetically generated peptide
  misc_feature (14)..(14): Xaa can be Cys or D-Cys
ACCEICCNPACTGXK

SEQ ID NO: 314 - protein, 15 aa, Artificial Sequence
  Synthetically generated peptide
  misc_feature (14)..(14): Xaa can be Cys or D-Cys
ACCEICCNPACTGXY

SEQ ID NO: 315 - protein, 14 aa, Artificial Sequence
  Synthetically generated peptide
ACCEICCTPACTGC

SEQ ID NO: 316 - protein, 15 aa, Artificial Sequence
  Synthetically generated peptide
ACCEICCTPACTGCK

SEQ ID NO: 317 - protein, 15 aa, Artificial Sequence
  Synthetically generated peptide
ACCEICCTPACTGCY

SEQ ID NO: 318 - protein, 14 aa, Artificial Sequence
  Synthetically generated peptide
  misc_feature (14)..(14): Xaa can be Cys or D-Cys
ACCEICCTPACTGX

SEQ ID NO: 319 - protein, 15 aa, Artificial Sequence
  Synthetically generated peptide
  misc_feature (14)..(14): Xaa can be Cys or D-Cys
ACCEICCTPACTGXK

SEQ ID NO: 320 - protein, 15 aa, Artificial Sequence
  Synthetically generated peptide
  misc_feature (14)..(14): Xaa can be Cys or D-Cys
ACCEICCTPACTGXY

SEQ ID NO: 321 - protein, 14 aa, Artificial Sequence
  Synthetically generated peptide
  misc_feature (6)..(6): Xaa can be Cys or D-Cys
ACCEIXCNPACTGC

SEQ ID NO: 322 - protein, 15 aa, Artificial Sequence
  Synthetically generated peptide
  misc_feature (6)..(6): Xaa can be Cys or D-Cys
ACCEIXCNPACTGCK

SEQ ID NO: 323 - protein, 15 aa, Artificial Sequence
  Synthetically generated peptide
  misc_feature (6)..(6): Xaa can be Cys or D-Cys
ACCEIXCNPACTGCY

SEQ ID NO: 324 - protein, 14 aa, Artificial Sequence
  Synthetically generated peptide
  misc_feature (6)..(6): Xaa can be Cys or D-Cys
  misc_feature (14)..(14): Xaa can be Cys or D-Cys
ACCEIXCNPACTGX

SEQ ID NO: 325 - protein, 15 aa, Artificial Sequence
  Synthetically generated peptide
  misc_feature (6)..(6): Xaa can be Cys or D-Cys
  misc_feature (14)..(14): Xaa can be Cys or D-Cys
ACCEIXCNPACTGXK

SEQ ID NO: 326 - protein, 15 aa, Artificial Sequence
  Synthetically generated peptide
  misc_feature (6)..(6): Xaa can be Cys or D-Cys
  misc_feature (14)..(14): Xaa can be Cys or D-Cys
ACCEIXCNPACTGXY

SEQ ID NO: 327 - protein, 14 aa, Artificial Sequence
  Synthetically generated peptide
  misc_feature (6)..(6): Xaa can be Cys or D-Cys
ACCEIXCTPACTGC

SEQ ID NO: 328 - protein, 15 aa, Artificial Sequence
  Synthetically generated peptide
  misc_feature (6)..(6): Xaa can be Cys or D-Cys
ACCEIXCTPACTGCK

SEQ ID NO: 329 - protein, 15 aa, Artificial Sequence
  Synthetically generated peptide
  misc_feature (6)..(6): Xaa can be Cys or D-Cys
ACCEIXCTPACTGCY

SEQ ID NO: 330 - protein, 14 aa, Artificial Sequence
  Synthetically generated peptide
  misc_feature (6)..(6): Xaa can be Cys or D-Cys
  misc_feature (14)..(14): Xaa can be Cys or D-Cys
ACCEIXCTPACTGX

SEQ ID NO: 331 - protein, 15 aa, Artificial Sequence
  Synthetically generated peptide
  misc_feature (6)..(6): Xaa can be Cys or D-Cys
  misc_feature (14)..(14): Xaa can be Cys or D-Cys
ACCEIXCTPACTGXK

SEQ ID NO: 332 - protein, 15 aa, Artificial Sequence
  Synthetically generated peptide
  misc_feature (6)..(6): Xaa can be Cys or D-Cys
  misc_feature (14)..(14): Xaa can be Cys or D-Cys
ACCEIXCTPACTGXY

SEQ ID NO: 333 - protein, 14 aa, Artificial Sequence
  Synthetically generated peptide
ACCELCCNPACTGC

SEQ ID NO: 334 - protein, 15 aa, Artificial Sequence
  Synthetically generated peptide
ACCELCCNPACTGCK

SEQ ID NO: 335 - protein, 15 aa, Artificial Sequence
  Synthetically generated peptide
ACCELCCNPACTGCY

SEQ ID NO: 336 - protein, 14 aa, Artificial Sequence
  Synthetically generated peptide
  misc_feature (14)..(14): Xaa can be Cys or D-Cys
ACCELCCNPACTGX

SEQ ID NO: 337 - protein, 15 aa, Artificial Sequence
  Synthetically generated peptide
  misc_feature (14)..(14): Xaa can be Cys or D-Cys
ACCELCCNPACTGXK

SEQ ID NO: 338 - protein, 15 aa, Artificial Sequence
  Synthetically generated peptide
  misc_feature (14)..(14): Xaa can be Cys or D-Cys
ACCELCCNPACTGXY

SEQ ID NO: 339 - protein, 14 aa, Artificial Sequence
  Synthetically generated peptide
ACCELCCTPACTGC

SEQ ID NO: 340 - protein, 15 aa, Artificial Sequence
  Synthetically generated peptide
ACCELCCTPACTGCK

SEQ ID NO: 341 - protein, 15 aa, Artificial Sequence
  Synthetically generated peptide
ACCELCCTPACTGCY

SEQ ID NO: 342 - protein, 14 aa, Artificial Sequence
  Synthetically generated peptide
  misc_feature (14)..(14): Xaa can be Cys or D-Cys
ACCELCCTPACTGX

SEQ ID NO: 343 - protein, 15 aa, Artificial Sequence
  Synthetically generated peptide
  misc_feature (14)..(14): Xaa can be Cys or D-Cys
ACCELCCTPACTGXK

SEQ ID NO: 344 - protein, 15 aa, Artificial Sequence
  Synthetically generated peptide
  misc_feature (14)..(14): Xaa can be Cys or D-Cys
ACCELCCTPACTGXY

SEQ ID NO: 345 - protein, 14 aa, Artificial Sequence
  Synthetically generated peptide
  misc_feature (6)..(6): Xaa can be Cys or D-Cys
ACCELXCNPACTGC

SEQ ID NO: 346 - protein, 15 aa, Artificial Sequence
  Synthetically generated peptide
  misc_feature (6)..(6): Xaa can be Cys or D-Cys
ACCELXCNPACTGCK

SEQ ID NO: 347 - protein, 15 aa, Artificial Sequence
  Synthetically generated peptide
  misc_feature (6)..(6): Xaa can be Cys or D-Cys
ACCELXCNPACTGCY

SEQ ID NO: 348 - protein, 14 aa, Artificial Sequence
  Synthetically generated peptide
  misc_feature (6)..(6): Xaa can be Cys or D-Cys
  misc_feature (14)..(14): Xaa can be Cys or D-Cys
ACCELXCNPACTGX

SEQ ID NO: 349 - protein, 15 aa, Artificial Sequence
  Synthetically generated peptide
  misc_feature (6)..(6): Xaa can be Cys or D-Cys
  misc_feature (14)..(14): Xaa can be Cys or D-Cys
ACCELXCNPACTGXK

SEQ ID NO: 350 - protein, 15 aa, Artificial Sequence
  Synthetically generated peptide
  misc_feature (6)..(6): Xaa can be Cys or D-Cys
  misc_feature (14)..(14): Xaa can be Cys or D-Cys
ACCELXCNPACTGXY

SEQ ID NO: 351 - protein, 14 aa, Artificial Sequence
  Synthetically generated peptide
  misc_feature (6)..(6): Xaa can be Cys or D-Cys
ACCELXCTPACTGC

SEQ ID NO: 352 - protein, 15 aa, Artificial Sequence
  Synthetically generated peptide
  misc_feature (6)..(6): Xaa can be Cys or D-Cys
ACCELXCTPACTGCK

SEQ ID NO: 353 - protein, 15 aa, Artificial Sequence
  Synthetically generated peptide
  misc_feature (6)..(6): Xaa can be Cys or D-Cys
ACCELXCTPACTGCY

SEQ ID NO: 354 - protein, 14 aa, Artificial Sequence
  Synthetically generated peptide
  misc_feature (6)..(6): Xaa can be Cys or D-Cys
  misc_feature (14)..(14): Xaa can be Cys or D-Cys
ACCELXCTPACTGX

SEQ ID NO: 355 - protein, 15 aa, Artificial Sequence
  Synthetically generated peptide
  misc_feature (6)..(6): Xaa can be Cys or D-Cys
  misc_feature (14)..(14): Xaa can be Cys or D-Cys
ACCELXCTPACTGXK

SEQ ID NO: 356 - protein, 15 aa, Artificial Sequence
  Synthetically generated peptide
  misc_feature (6)..(6): Xaa can be Cys or D-Cys
  misc_feature (14)..(14): Xaa can be Cys or D-Cys
ACCELXCTPACTGXY

SEQ ID NO: 357 - protein, 14 aa, Artificial Sequence
  Synthetically generated peptide
ACCEYCCNPACTGC

SEQ ID NO: 358 - protein, 15 aa, Artificial Sequence
  Synthetically generated peptide
ACCEYCCNPACTGCK

SEQ ID NO: 359 - protein, 15 aa, Artificial Sequence
  Synthetically generated peptide
ACCEYCCNPACTGCY

SEQ ID NO: 360 - protein, 14 aa, Artificial Sequence
  Synthetically generated peptide
  misc_feature (14)..(14): Xaa can be Cys or D-Cys
ACCEYCCNPACTGX

SEQ ID NO: 361 - protein, 15 aa, Artificial Sequence
  Synthetically generated peptide
  misc_feature (14)..(14): Xaa can be Cys or D-Cys
ACCEYCCNPACTGXK

SEQ ID NO: 362 - protein, 15 aa, Artificial Sequence
  Synthetically generated peptide
  misc_feature (14)..(14): Xaa can be Cys or D-Cys
ACCEYCCNPACTGXY

SEQ ID NO: 363 - protein, 14 aa, Artificial Sequence
  Synthetically generated peptide
ACCEYCCTPACTGC

SEQ ID NO: 364 - protein, 15 aa, Artificial Sequence
  Synthetically generated peptide
ACCEYCCTPACTGCK

SEQ ID NO: 365 - protein, 15 aa, Artificial Sequence
  Synthetically generated peptide
ACCEYCCTPACTGCY

SEQ ID NO: 366 - protein, 14 aa, Artificial Sequence
  Synthetically generated peptide
  misc_feature (14)..(14): Xaa can be Cys or D-Cys
ACCEYCCTPACTGX

SEQ ID NO: 367 - protein, 15 aa, Artificial Sequence
  Synthetically generated peptide
  misc_feature (14)..(14): Xaa can be Cys or D-Cys
ACCEYCCTPACTGXK

SEQ ID NO: 368 - protein, 15 aa, Artificial Sequence
  Synthetically generated peptide
  misc_feature (14)..(14): Xaa can be Cys or D-Cys
ACCEYCCTPACTGXY

SEQ ID NO: 369 - protein, 14 aa, Artificial Sequence
  Synthetically generated peptide
  misc_feature (6)..(6): Xaa can be Cys or D-Cys
ACCEYXCNPACTGC

SEQ ID NO: 370 - protein, 15 aa, Artificial Sequence
  Synthetically generated peptide
  misc_feature (6)..(6): Xaa can be Cys or D-Cys
ACCEYXCNPACTGCK

SEQ ID NO: 371 - protein, 15 aa, Artificial Sequence
  Synthetically generated peptide
  misc_feature (6)..(6): Xaa can be Cys or D-Cys
ACCEYXCNPACTGCY

SEQ ID NO: 372 - protein, 14 aa, Artificial Sequence
  Synthetically generated peptide
  misc_feature (6)..(6): Xaa can be Cys or D-Cys
  misc_feature (14)..(14): Xaa can be Cys or D-Cys
ACCEYXCNPACTGX

SEQ ID NO: 373 - protein, 15 aa, Artificial Sequence
  Synthetically generated peptide
  misc_feature (6)..(6): Xaa can be Cys or D-Cys
  misc_feature (14)..(14): Xaa can be Cys or D-Cys
ACCEYXCNPACTGXK

SEQ ID NO: 374 - protein, 15 aa, Artificial Sequence
  Synthetically generated peptide
  misc_feature (6)..(6): Xaa can be Cys or D-Cys
  misc_feature (14)..(14): Xaa can be Cys or D-Cys
ACCEYXCNPACTGXY

SEQ ID NO: 375 - protein, 14 aa, Artificial Sequence
  Synthetically generated peptide
  misc_feature (6)..(6): Xaa can be Cys or D-Cys
ACCEYXCTPACTGC

SEQ ID NO: 376 - protein, 15 aa, Artificial Sequence
  Synthetically generated peptide
  misc_feature (6)..(6): Xaa can be Cys or D-Cys
ACCEYXCTPACTGCK

SEQ ID NO: 377 - protein, 15 aa, Artificial Sequence
  Synthetically generated peptide
  misc_feature (6)..(6): Xaa can be Cys or D-Cys
ACCEYXCTPACTGCY

SEQ ID NO: 378 - protein, 14 aa, Artificial Sequence
  Synthetically generated peptide
  misc_feature (6)..(6): Xaa can be Cys or D-Cys
  misc_feature (14)..(14): Xaa can be Cys or D-Cys
ACCEYXCTPACTGX

SEQ ID NO: 379 - protein, 15 aa, Artificial Sequence
  Synthetically generated peptide
  misc_feature (6)..(6): Xaa can be Cys or D-Cys
  misc_feature (14)..(14): Xaa can be Cys or D-Cys
ACCEYXCTPACTGXK

SEQ ID NO: 380 - protein, 15 aa, Artificial Sequence
  Synthetically generated peptide
  misc_feature (6)..(6): Xaa can be Cys or D-Cys
  misc_feature (14)..(14): Xaa can be Cys or D-Cys
ACCEYXCTPACTGXY

SEQ ID NO: 381 - protein, 14 aa, Artificial Sequence
  Synthetically generated peptide
ACCEFCCNPACTGC

SEQ ID NO: 382 - protein, 15 aa, Artificial Sequence
  Synthetically generated peptide
ACCEFCCNPACTGCK

SEQ ID NO: 383 - protein, 15 aa, Artificial Sequence
  Synthetically generated peptide
ACCEFCCNPACTGCY

SEQ ID NO: 384 - protein, 14 aa, Artificial Sequence
  Synthetically generated peptide
  misc_feature (14)..(14): Xaa can be Cys or D-Cys
ACCEFCCNPACTGX

SEQ ID NO: 385 - protein, 15 aa, Artificial Sequence
  Synthetically generated peptide
  misc_feature (14)..(14): Xaa can be Cys or D-Cys
ACCEFCCNPACTGXK

SEQ ID NO: 386 - protein, 15 aa, Artificial Sequence
  Synthetically generated peptide
  misc_feature (14)..(14): Xaa can be Cys or D-Cys
ACCEFCCNPACTGXY

SEQ ID NO: 387 - protein, 14 aa, Artificial Sequence
  Synthetically generated peptide
ACCEFCCTPACTGC

SEQ ID NO: 388 - protein, 15 aa, Artificial Sequence
  Synthetically generated peptide
ACCEFCCTPACTGCK

SEQ ID NO: 389 - protein, 15 aa, Artificial Sequence
  Synthetically generated peptide
ACCEFCCTPACTGCY

SEQ ID NO: 390 - protein, 14 aa, Artificial Sequence
  Synthetically generated peptide
  misc_feature (14)..(14): Xaa can be Cys or D-Cys
ACCEFCCTPACTGX

SEQ ID NO: 391 - protein, 15 aa, Artificial Sequence
  Synthetically generated peptide
  misc_feature (14)..(14): Xaa can be Cys or D-Cys
ACCEFCCTPACTGXK

SEQ ID NO: 392 - protein, 15 aa, Artificial Sequence
  Synthetically generated peptide
  misc_feature (14)..(14): Xaa can be Cys or D-Cys
ACCEFCCTPACTGXY

SEQ ID NO: 393 - protein, 14 aa, Artificial Sequence
  Synthetically generated peptide
  misc_feature (6)..(6): Xaa can be Cys or D-Cys
ACCEFXCNPACTGC

SEQ ID NO: 394 - protein, 15 aa, Artificial Sequence
  Synthetically generated peptide
  misc_feature (6)..(6): Xaa can be Cys or D-Cys
ACCEFXCNPACTGCK

SEQ ID NO: 395 - protein, 15 aa, Artificial Sequence
  Synthetically generated peptide
  misc_feature (6)..(6): Xaa can be Cys or D-Cys
ACCEFXCNPACTGCY

SEQ ID NO: 396 - protein, 14 aa, Artificial Sequence
  Synthetically generated peptide
  misc_feature (6)..(6): Xaa can be Cys or D-Cys
  misc_feature (14)..(14): Xaa can be Cys or D-Cys
ACCEFXCNPACTGX

SEQ ID NO: 397 - protein, 15 aa, Artificial Sequence
  Synthetically generated peptide
  misc_feature (6)..(6): Xaa can be Cys or D-Cys
  misc_feature (14)..(14): Xaa can be Cys or D-Cys
ACCEFXCNPACTGXK

SEQ ID NO: 398 - protein, 15 aa, Artificial Sequence
  Synthetically generated peptide
  misc_feature (6)..(6): Xaa can be Cys or D-Cys
  misc_feature (14)..(14): Xaa can be Cys or D-Cys
ACCEFXCNPACTGXY

SEQ ID NO: 399 - protein, 14 aa, Artificial Sequence
  Synthetically generated peptide
  misc_feature (6)..(6): Xaa can be Cys or D-Cys
ACCEFXCTPACTGC

SEQ ID NO: 400 - protein, 15 aa, Artificial Sequence
  Synthetically generated peptide
  misc_feature (6)..(6): Xaa can be Cys or D-Cys
ACCEFXCTPACTGCK

SEQ ID NO: 401 - protein, 15 aa, Artificial Sequence
  Synthetically generated peptide
  misc_feature (6)..(6): Xaa can be Cys or D-Cys
ACCEFXCTPACTGCY

SEQ ID NO: 402 - protein, 14 aa, Artificial Sequence
  Synthetically generated peptide
  misc_feature (6)..(6): Xaa can be Cys or D-Cys
  misc_feature (14)..(14): Xaa can be Cys or D-Cys
ACCEFXCTPACTGX

SEQ ID NO: 403 - protein, 15 aa, Artificial Sequence
  Synthetically generated peptide
  misc_feature (6)..(6): Xaa can be Cys or D-Cys
  misc_feature (14)..(14): Xaa can be Cys or D-Cys
ACCEFXCTPACTGXK

SEQ ID NO: 404 - protein, 15 aa, Artificial Sequence
  Synthetically generated peptide
  misc_feature (6)..(6): Xaa can be Cys or D-Cys
  misc_feature (14)..(14): Xaa can be Cys or D-Cys
ACCEFXCTPACTGXY

SEQ ID NO: 405 - protein, 14 aa, Artificial Sequence
  Synthetically generated peptide
ACCEWCCNPACTGC

SEQ ID NO: 406 - protein, 15 aa, Artificial Sequence
  Synthetically generated peptide
ACCEWCCNPACTGCK

SEQ ID NO: 407 - protein, 15 aa, Artificial Sequence
  Synthetically generated peptide
ACCEWCCNPACTGCY

SEQ ID NO: 408 - protein, 14 aa, Artificial Sequence
  Synthetically generated peptide
  misc_feature (14)..(14): Xaa can be Cys or D-Cys
ACCEWCCNPACTGX

SEQ ID NO: 409 - protein, 15 aa, Artificial Sequence
  Synthetically generated peptide
  misc_feature (14)..(14): Xaa can be Cys or D-Cys
ACCEWCCNPACTGXK

SEQ ID NO: 410 - protein, 15 aa, Artificial Sequence
  Synthetically generated peptide
  misc_feature (14)..(14): Xaa can be Cys or D-Cys
ACCEWCCNPACTGXY

SEQ ID NO: 411 - protein, 14 aa, Artificial Sequence
  Synthetically generated peptide
ACCEWCCTPACTGC

SEQ ID NO: 412 - protein, 15 aa, Artificial Sequence
  Synthetically generated peptide
ACCEWCCTPACTGCK

SEQ ID NO: 413 - protein, 15 aa, Artificial Sequence
  Synthetically generated peptide
ACCEWCCTPACTGCY

SEQ ID NO: 414 - protein, 14 aa, Artificial Sequence
  Synthetically generated peptide
  misc_feature (14)..(14): Xaa can be Cys or D-Cys
ACCEWCCTPACTGX

SEQ ID NO: 415 - protein, 15 aa, Artificial Sequence
  Synthetically generated peptide
  misc_feature (14)..(14): Xaa can be Cys or D-Cys
ACCEWCCTPACTGXK

SEQ ID NO: 416 - protein, 15 aa, Artificial Sequence
  Synthetically generated peptide
  misc_feature (14)..(14): Xaa can be Cys or D-Cys
ACCEWCCTPACTGXY

SEQ ID NO: 417 - protein, 14 aa, Artificial Sequence
  Synthetically generated peptide
  misc_feature (6)..(6): Xaa can be Cys or D-Cys
ACCEWXCNPACTGC

SEQ ID NO: 418 - protein, 15 aa, Artificial Sequence
  Synthetically generated peptide
  misc_feature (6)..(6): Xaa can be Cys or D-Cys
ACCEWXCNPACTGCK

SEQ ID NO: 419 - protein, 15 aa, Artificial Sequence
  Synthetically generated peptide
  misc_feature (6)..(6): Xaa can be Cys or D-Cys
ACCEWXCNPACTGCY

SEQ ID NO: 420 - protein, 14 aa, Artificial Sequence
  Synthetically generated peptide
  misc_feature (6)..(6): Xaa can be Cys or D-Cys
  misc_feature (14)..(14): Xaa can be Cys or D-Cys
ACCEWXCNPACTGX

SEQ ID NO: 421 - protein, 15 aa, Artificial Sequence
  Synthetically generated peptide
  misc_feature (6)..(6): Xaa can be Cys or D-Cys
  misc_feature (14)..(14): Xaa can be Cys or D-Cys
ACCEWXCNPACTGXK

SEQ ID NO: 422 - protein, 15 aa, Artificial Sequence
  Synthetically generated peptide
  misc_feature (6)..(6): Xaa can be Cys or D-Cys
  misc_feature (14)..(14): Xaa can be Cys or D-Cys
ACCEWXCNPACTGXY

SEQ ID NO: 423 - protein, 14 aa, Artificial Sequence
  Synthetically generated peptide
  misc_feature (6)..(6): Xaa can be Cys or D-Cys
ACCEWXCTPACTGC

SEQ ID NO: 424 - protein, 15 aa, Artificial Sequence
  Synthetically generated peptide
  misc_feature (6)..(6): Xaa can be Cys or D-Cys
ACCEWXCTPACTGCK

SEQ ID NO: 425 - protein, 15 aa, Artificial Sequence
  Synthetically generated peptide
  misc_feature (6)..(6): Xaa can be Cys or D-Cys
ACCEWXCTPACTGCY

SEQ ID NO: 426 - protein, 14 aa, Artificial Sequence
  Synthetically generated peptide
  misc_feature (6)..(6): Xaa can be Cys or D-Cys
  misc_feature (14)..(14): Xaa can be Cys or D-Cys
ACCEWXCTPACTGX

SEQ ID NO: 427 - protein, 15 aa, Artificial Sequence
  Synthetically generated peptide
  misc_feature (6)..(6): Xaa can be Cys or D-Cys
  misc_feature (14)..(14): Xaa can be Cys or D-Cys
ACCEWXCTPACTGXK

SEQ ID NO: 428 - protein, 15 aa, Artificial Sequence
  Synthetically generated peptide
  misc_feature (6)..(6): Xaa can be Cys or D-Cys
  misc_feature (14)..(14): Xaa can be Cys or D-Cys
ACCEWXCTPACTGXY

SEQ ID NO: 429 - protein, 14 aa, Artificial Sequence
  Synthetically generated peptide
  misc_feature (2)..(2): Xaa can be Cys or D-Cys
AXCEVCCNPACTGC

SEQ ID NO: 430 - protein, 15 aa, Artificial Sequence
  Synthetically generated peptide
  misc_feature (2)..(2): Xaa can be Cys or D-Cys
AXCEVCCNPACTGCK

SEQ ID NO: 431 - protein, 15 aa, Artificial Sequence
  Synthetically generated peptide
  misc_feature (2)..(2): Xaa can be Cys or D-Cys
AXCEVCCNPACTGCY

SEQ ID NO: 432 - protein, 14 aa, Artificial Sequence
  Synthetically generated peptide
  misc_feature (2)..(2): Xaa can be Cys or D-Cys
  misc_feature (14)..(14): Xaa can be Cys or D-Cys
AXCEVCCNPACTGX

SEQ ID NO: 433 - protein, 15 aa, Artificial Sequence
  Synthetically generated peptide
  misc_feature (2)..(2): Xaa can be Cys or D-Cys
  misc_feature (14)..(14): Xaa can be Cys or D-Cys
AXCEVCCNPACTGXK

SEQ ID NO: 434 - protein, 15 aa, Artificial Sequence
  Synthetically generated peptide
  misc_feature (2)..(2): Xaa can be Cys or D-Cys
  misc_feature (14)..(14): Xaa can be Cys or D-Cys
AXCEVCCNPACTGXY

SEQ ID NO: 435 - protein, 14 aa, Artificial Sequence
  Synthetically generated peptide
  misc_feature (2)..(2): Xaa can be Cys or D-Cys
AXCEVCCTPACTGC

SEQ ID NO: 436 - protein, 15 aa, Artificial Sequence
  Synthetically generated peptide
  misc_feature (2)..(2): Xaa can be Cys or D-Cys
AXCEVCCTPACTGCK

SEQ ID NO: 437 - protein, 15 aa, Artificial Sequence
  Synthetically generated peptide
  misc_feature (2)..(2): Xaa can be Cys or D-Cys
AXCEVCCTPACTGCY

SEQ ID NO: 438 - protein, 14 aa, Artificial Sequence
  Synthetically generated peptide
  misc_feature (2)..(2): Xaa can be Cys or D-Cys
  misc_feature (14)..(14): Xaa can be Cys or D-Cys
AXCEVCCTPACTGX

SEQ ID NO: 439 - protein, 15 aa, Artificial Sequence
  Synthetically generated peptide
  misc_feature (2)..(2): Xaa can be Cys or D-Cys
  misc_feature (14)..(14): Xaa can be Cys or D-Cys
AXCEVCCTPACTGXK

SEQ ID NO: 440 - protein, 15 aa, Artificial Sequence
  Synthetically generated peptide
  misc_feature (2)..(2): Xaa can be Cys or D-Cys
  misc_feature (14)..(14): Xaa can be Cys or D-Cys
AXCEVCCTPACTGXY

SEQ ID NO: 441 - protein, 14 aa, Artificial Sequence
  Synthetically generated peptide
  misc_feature (2)..(2): Xaa can be Cys or D-Cys
  misc_feature (6)..(6): Xaa can be Cys or D-Cys
AXCEVXCNPACTGC

SEQ ID NO: 442 - protein, 15 aa, Artificial Sequence
  Synthetically generated peptide
  misc_feature (2)..(2): Xaa can be Cys or D-Cys
  misc_feature (6)..(6): Xaa can be Cys or D-Cys
AXCEVXCNPACTGCK

SEQ ID NO: 443 - protein, 15 aa, Artificial Sequence
  Synthetically generated peptide
  misc_feature (2)..(2): Xaa can be Cys or D-Cys
  misc_feature (6)..(6): Xaa can be Cys or D-Cys
AXCEVXCNPACTGCY

SEQ ID NO: 444 - protein, 14 aa, Artificial Sequence
  Synthetically generated peptide
  misc_feature (2)..(2): Xaa can be Cys or D-Cys
  misc_feature (6)..(6): Xaa can be Cys or D-Cys
  misc_feature (14)..(14): Xaa can be Cys or D-Cys
AXCEVXCNPACTGX

SEQ ID NO: 445 - protein, 15 aa, Artificial Sequence
  Synthetically generated peptide
  misc_feature (2)..(2): Xaa can be Cys or D-Cys
  misc_feature (6)..(6): Xaa can be Cys or D-Cys
  misc_feature (14)..(14): Xaa can be Cys or D-Cys
AXCEVXCNPACTGXK

SEQ ID NO: 446 - protein, 15 aa, Artificial Sequence
  Synthetically generated peptide
  misc_feature (2)..(2): Xaa can be Cys or D-Cys
  misc_feature (6)..(6): Xaa can be Cys or D-Cys
  misc_feature (14)..(14): Xaa can be Cys or D-Cys
AXCEVXCNPACTGXY

SEQ ID NO: 447 - protein, 14 aa, Artificial Sequence
  Synthetically generated peptide
  misc_feature (2)..(2): Xaa can be Cys or D-Cys
  misc_feature (6)..(6): Xaa can be Cys or D-Cys
AXCEVXCTPACTGC

SEQ ID NO: 448 - protein, 15 aa, Artificial Sequence
  Synthetically generated peptide
  misc_feature (2)..(2): Xaa can be Cys or D-Cys
  misc_feature (6)..(6): Xaa can be Cys or D-Cys
AXCEVXCTPACTGCK

SEQ ID NO: 449 - protein, 15 aa, Artificial Sequence
  Synthetically generated peptide
  misc_feature (2)..(2): Xaa can be Cys or D-Cys
  misc_feature (6)..(6): Xaa can be Cys or D-Cys
AXCEVXCTPACTGCY

SEQ ID NO: 450 - protein, 14 aa, Artificial Sequence
  Synthetically generated peptide
  misc_feature (2)..(2): Xaa can be Cys or D-Cys
  misc_feature (6)..(6): Xaa can be Cys or D-Cys
  misc_feature (14)..(14): Xaa can be Cys or D-Cys
AXCEVXCTPACTGX

SEQ ID NO: 451 - protein, 15 aa, Artificial Sequence
  Synthetically generated peptide
  misc_feature (2)..(2): Xaa can be Cys or D-Cys
  misc_feature (6)..(6): Xaa can be Cys or D-Cys
  misc_feature (14)..(14): Xaa can be Cys or D-Cys
AXCEVXCTPACTGXK

SEQ ID NO: 452 - protein, 15 aa, Artificial Sequence
  Synthetically generated peptide
  misc_feature (2)..(2): Xaa can be Cys or D-Cys
  misc_feature (6)..(6): Xaa can be Cys or D-Cys
  misc_feature (14)..(14): Xaa can be Cys or D-Cys
AXCEVXCTPACTGXY

SEQ ID NO: 453 - protein, 14 aa, Artificial Sequence
  Synthetically generated peptide
  misc_feature (2)..(2): Xaa can be Cys or D-Cys
AXCEICCNPACTGC

SEQ ID NO: 454 - protein, 15 aa, Artificial Sequence
  Synthetically generated peptide
  misc_feature (2)..(2): Xaa can be Cys or D-Cys
AXCEICCNPACTGCK

SEQ ID NO: 455 - protein, 15 aa, Artificial Sequence
  Synthetically generated peptide
  misc_feature (2)..(2): Xaa can be Cys or D-Cys
AXCEICCNPACTGCY

SEQ ID NO: 456 - protein, 14 aa, Artificial Sequence
  Synthetically generated peptide
  misc_feature (2)..(2): Xaa can be Cys or D-Cys
  misc_feature (14)..(14): Xaa can be Cys or D-Cys
AXCEICCNPACTGX

SEQ ID NO: 457 - protein, 15 aa, Artificial Sequence
  Synthetically generated peptide
  misc_feature (2)..(2): Xaa can be Cys or D-Cys
  misc_feature (14)..(14): Xaa can be Cys or D-Cys
AXCEICCNPACTGXK

SEQ ID NO: 458 - protein, 15 aa, Artificial Sequence
  Synthetically generated peptide
  misc_feature (2)..(2): Xaa can be Cys or D-Cys
  misc_feature (14)..(14): Xaa can be Cys or D-Cys
AXCEICCNPACTGXY

SEQ ID NO: 459 - protein, 14 aa, Artificial Sequence
  Synthetically generated peptide
  misc_feature (2)..(2): Xaa can be Cys or D-Cys
AXCEICCTPACTGC

SEQ ID NO: 460 - protein, 15 aa, Artificial Sequence
  Synthetically generated peptide
  misc_feature (2)..(2): Xaa can be Cys or D-Cys
AXCEICCTPACTGCK

SEQ ID NO: 461 - protein, 15 aa, Artificial Sequence
  Synthetically generated peptide
  misc_feature (2)..(2): Xaa can be Cys or D-Cys
AXCEICCTPACTGCY

SEQ ID NO: 462 - protein, 14 aa, Artificial Sequence
  Synthetically generated peptide
  misc_feature (2)..(2): Xaa can be Cys or D-Cys
  misc_feature (14)..(14): Xaa can be Cys or D-Cys
AXCEICCTPACTGX

SEQ ID NO: 463 - protein, 15 aa, Artificial Sequence
  Synthetically generated peptide
  misc_feature (2)..(2): Xaa can be Cys or D-Cys
  misc_feature (14)..(14): Xaa can be Cys or D-Cys
AXCEICCTPACTGXK

SEQ ID NO: 464 - protein, 15 aa, Artificial Sequence
  Synthetically generated peptide
  misc_feature (2)..(2): Xaa can be Cys or D-Cys
  misc_feature (14)..(14): Xaa can be Cys or D-Cys
AXCEICCTPACTGXY

SEQ ID NO: 465 - protein, 14 aa, Artificial Sequence
  Synthetically generated peptide
  misc_feature (2)..(2): Xaa can be Cys or D-Cys
  misc_feature (6)..(6): Xaa can be Cys or D-Cys
AXCEIXCNPACTGC

SEQ ID NO: 466 - protein, 15 aa, Artificial Sequence
  Synthetically generated peptide
  misc_feature (2)..(2): Xaa can be Cys or D-Cys
  misc_feature (6)..(6): Xaa can be Cys or D-Cys
AXCEIXCNPACTGCK

SEQ ID NO: 467 - protein, 15 aa, Artificial Sequence
  Synthetically generated peptide
  misc_feature (2)..(2): Xaa can be Cys or D-Cys
  misc_feature (6)..(6): Xaa can be Cys or D-Cys
AXCEIXCNPACTGCY

SEQ ID NO: 468 - protein, 14 aa, Artificial Sequence
  Synthetically generated peptide
  misc_feature (2)..(2): Xaa can be Cys or D-Cys
  misc_feature (6)..(6): Xaa can be Cys or D-Cys
  misc_feature (14)..(14): Xaa can be Cys or D-Cys
AXCEIXCNPACTGX

SEQ ID NO: 469 - protein, 15 aa, Artificial Sequence
  Synthetically generated peptide
  misc_feature (2)..(2): Xaa can be Cys or D-Cys
  misc_feature (6)..(6): Xaa can be Cys or D-Cys
  misc_feature (14)..(14): Xaa can be Cys or D-Cys
AXCEIXCNPACTGXK

SEQ ID NO: 470 - protein, 15 aa, Artificial Sequence
  Synthetically generated peptide
  misc_feature (2)..(2): Xaa can be Cys or D-Cys
  misc_feature (6)..(6): Xaa can be Cys or D-Cys
  misc_feature (14)..(14): Xaa can be Cys or D-Cys
AXCEIXCNPACTGXY

SEQ ID NO: 471 - protein, 14 aa, Artificial Sequence
  Synthetically generated peptide
  misc_feature (2)..(2): Xaa can be Cys or D-Cys
  misc_feature (6)..(6): Xaa can be Cys or D-Cys
AXCEIXCTPACTGC

SEQ ID NO: 472 - protein, 15 aa, Artificial Sequence
  Synthetically generated peptide
  misc_feature (2)..(2): Xaa can be Cys or D-Cys
  misc_feature (6)..(6): Xaa can be Cys or D-Cys
AXCEIXCTPACTGCK

SEQ ID NO: 473 - protein, 15 aa, Artificial Sequence
  Synthetically generated peptide
  misc_feature (2)..(2): Xaa can be Cys or D-Cys
  misc_feature (6)..(6): Xaa can be Cys or D-Cys
AXCEIXCTPACTGCY

SEQ ID NO: 474 - protein, 14 aa, Artificial Sequence
  Synthetically generated peptide
  misc_feature (2)..(2): Xaa can be Cys or D-Cys
  misc_feature (6)..(6): Xaa can be Cys or D-Cys
  misc_feature (14)..(14): Xaa can be Cys or D-Cys
AXCEIXCTPACTGX

SEQ ID NO: 475 - protein, 15 aa, Artificial Sequence
  Synthetically generated peptide
  misc_feature (2)..(2): Xaa can be Cys or D-Cys
  misc_feature (6)..(6): Xaa can be Cys or D-Cys
  misc_feature (14)..(14): Xaa can be Cys or D-Cys
AXCEIXCTPACTGXK

SEQ ID NO: 476 - protein, 15 aa, Artificial Sequence
  Synthetically generated peptide
  misc_feature (2)..(2): Xaa can be Cys or D-Cys
  misc_feature (6)..(6): Xaa can be Cys or D-Cys
  misc_feature (14)..(14): Xaa can be Cys or D-Cys
AXCEIXCTPACTGXY

SEQ ID NO: 477 - protein, 14 aa, Artificial Sequence
  Synthetically generated peptide
  misc_feature (2)..(2): Xaa can be Cys or D-Cys
AXCELCCNPACTGC

SEQ ID NO: 478 - protein, 15 aa, Artificial Sequence
  Synthetically generated peptide
  misc_feature (2)..(2): Xaa can be Cys or D-Cys
AXCELCCNPACTGCK

SEQ ID NO: 479 - protein, 15 aa, Artificial Sequence
  Synthetically generated peptide
  misc_feature (2)..(2): Xaa can be Cys or D-Cys
AXCELCCNPACTGCY

SEQ ID NO: 480 - protein, 14 aa, Artificial Sequence
  Synthetically generated peptide
  misc_feature (2)..(2): Xaa can be Cys or D-Cys
  misc_feature (14)..(14): Xaa can be Cys or D-Cys
AXCELCCNPACTGX

SEQ ID NO: 481 - protein, 15 aa, Artificial Sequence
  Synthetically generated peptide
  misc_feature (2)..(2): Xaa can be Cys or D-Cys
  misc_feature (14)..(14): Xaa can be Cys or D-Cys
AXCELCCNPACTGXK

SEQ ID NO: 482 - protein, 15 aa, Artificial Sequence
  Synthetically generated peptide
  misc_feature (2)..(2): Xaa can be Cys or D-Cys
  misc_feature (14)..(14): Xaa can be Cys or D-Cys
AXCELCCNPACTGXY

SEQ ID NO: 483 - protein, 14 aa, Artificial Sequence
  Synthetically generated peptide
  misc_feature (2)..(2): Xaa can be Cys or D-Cys
AXCELCCTPACTGC

SEQ ID NO: 484 - protein, 15 aa, Artificial Sequence
  Synthetically generated peptide
  misc_feature (2)..(2): Xaa can be Cys or D-Cys
AXCELCCTPACTGCK

SEQ ID NO: 485 - protein, 15 aa, Artificial Sequence
  Synthetically generated peptide
  misc_feature (2)..(2): Xaa can be Cys or D-Cys
AXCELCCTPACTGCY

SEQ ID NO: 486 - protein, 14 aa, Artificial Sequence
  Synthetically generated peptide
  misc_feature (2)..(2): Xaa can be Cys or D-Cys
  misc_feature (14)..(14): Xaa can be Cys or D-Cys
AXCELCCTPACTGX

SEQ ID NO: 487 - protein, 15 aa, Artificial Sequence
  Synthetically generated peptide
  misc_feature (2)..(2): Xaa can be Cys or D-Cys
  misc_feature (14)..(14): Xaa can be Cys or D-Cys
AXCELCCTPACTGXK

SEQ ID NO: 488 - protein, 15 aa, Artificial Sequence
  Synthetically generated peptide
  misc_feature (2)..(2): Xaa can be Cys or D-Cys
  misc_feature (14)..(14): Xaa can be Cys or D-Cys
AXCELCCTPACTGXY

SEQ ID NO: 489 - protein, 14 aa, Artificial Sequence
  Synthetically generated peptide
  misc_feature (2)..(2): Xaa can be Cys or D-Cys
  misc_feature (6)..(6): Xaa can be Cys or D-Cys
AXCELXCNPACTGC

SEQ ID NO: 490 - protein, 15 aa, Artificial Sequence
  Synthetically generated peptide
  misc_feature (2)..(2): Xaa can be Cys or D-Cys
  misc_feature (6)..(6): Xaa can be Cys or D-Cys
AXCELXCNPACTGCK

SEQ ID NO: 491 - protein, 15 aa, Artificial Sequence
  Synthetically generated peptide
  misc_feature (2)..(2): Xaa can be Cys or D-Cys
  misc_feature (6)..(6): Xaa can be Cys or D-Cys
AXCELXCNPACTGCY

SEQ ID NO: 492 - protein, 14 aa, Artificial Sequence
  Synthetically generated peptide
  misc_feature (2)..(2): Xaa can be Cys or D-Cys
  misc_feature (6)..(6): Xaa can be Cys or D-Cys
  misc_feature (14)..(14): Xaa can be Cys or D-Cys
AXCELXCNPACTGX

SEQ ID NO: 493 - protein, 15 aa, Artificial Sequence
  Synthetically generated peptide
  misc_feature (2)..(2): Xaa can be Cys or D-Cys
  misc_feature (6)..(6): Xaa can be Cys or D-Cys
  misc_feature (14)..(14): Xaa can be Cys or D-Cys
AXCELXCNPACTGXK

SEQ ID NO: 494 - protein, 15 aa, Artificial Sequence
  Synthetically generated peptide
  misc_feature (2)..(2): Xaa can be Cys or D-Cys
  misc_feature (6)..(6): Xaa can be Cys or D-Cys
  misc_feature (14)..(14): Xaa can be Cys or D-Cys
AXCELXCNPACTGXY

SEQ ID NO: 495 - protein, 14 aa, Artificial Sequence
  Synthetically generated peptide
  misc_feature (2)..(2): Xaa can be Cys or D-Cys
  misc_feature (6)..(6): Xaa can be Cys or D-Cys
AXCELXCTPACTGC

SEQ ID NO: 496 - protein, 15 aa, Artificial Sequence
  Synthetically generated peptide
  misc_feature (2)..(2): Xaa can be Cys or D-Cys
  misc_feature (6)..(6): Xaa can be Cys or D-Cys
AXCELXCTPACTGCK

SEQ ID NO: 497 - protein, 15 aa, Artificial Sequence
  Synthetically generated peptide
  misc_feature (2)..(2): Xaa can be Cys or D-Cys
  misc_feature (6)..(6): Xaa can be Cys or D-Cys
AXCELXCTPACTGCY

SEQ ID NO: 498 - protein, 14 aa, Artificial Sequence
  Synthetically generated peptide
  misc_feature (2)..(2): Xaa can be Cys or D-Cys
  misc_feature (6)..(6): Xaa can be Cys or D-Cys
  misc_feature (14)..(14): Xaa can be Cys or D-Cys
AXCELXCTPACTGX

SEQ ID NO: 499 - protein, 15 aa, Artificial Sequence
  Synthetically generated peptide
  misc_feature (2)..(2): Xaa can be Cys or D-Cys
  misc_feature (6)..(6): Xaa can be Cys or D-Cys
  misc_feature (14)..(14): Xaa can be Cys or D-Cys
AXCELXCTPACTGXK

SEQ ID NO: 500 - protein, 15 aa, Artificial Sequence
  Synthetically generated peptide
  misc_feature (2)..(2): Xaa can be Cys or D-Cys
  misc_feature (6)..(6): Xaa can be Cys or D-Cys
  misc_feature (14)..(14): Xaa can be Cys or D-Cys
AXCELXCTPACTGXY

SEQ ID NO: 501 - protein, 14 aa, Artificial Sequence
  Synthetically generated peptide
  misc_feature (2)..(2): Xaa can be Cys or D-Cys
AXCEYCCNPACTGC

SEQ ID NO: 502 - protein, 15 aa, Artificial Sequence
  Synthetically generated peptide
  misc_feature (2)..(2): Xaa can be Cys or D-Cys
AXCEYCCNPACTGCK

SEQ ID NO: 503 - protein, 15 aa, Artificial Sequence
  Synthetically generated peptide
  misc_feature (2)..(2): Xaa can be Cys or D-Cys
AXCEYCCNPACTGCY

SEQ ID NO: 504 - protein, 14 aa, Artificial Sequence
  Synthetically generated peptide
  misc_feature (2)..(2): Xaa can be Cys or D-Cys
  misc_feature (14)..(14): Xaa can be Cys or D-Cys
AXCEYCCNPACTGX

SEQ ID NO: 505 - protein, 15 aa, Artificial Sequence
  Synthetically generated peptide
  misc_feature (2)..(2): Xaa can be Cys or D-Cys
  misc_feature (14)..(14): Xaa can be Cys or D-Cys
AXCEYCCNPACTGXK

SEQ ID NO: 506 - protein, 15 aa, Artificial Sequence
  Synthetically generated peptide
  misc_feature (2)..(2): Xaa can be Cys or D-Cys
  misc_feature (14)..(14): Xaa can be Cys or D-Cys
AXCEYCCNPACTGXY

SEQ ID NO: 507 - protein, 14 aa, Artificial Sequence
  Synthetically generated peptide
  misc_feature (2)..(2): Xaa can be Cys or D-Cys
AXCEYCCTPACTGC

SEQ ID NO: 508 - protein, 15 aa, Artificial Sequence
  Synthetically generated peptide
  misc_feature (2)..(2): Xaa can be Cys or D-Cys
AXCEYCCTPACTGCK

SEQ ID NO: 509 - protein, 15 aa, Artificial Sequence
  Synthetically generated peptide
  misc_feature (2)..(2): Xaa can be Cys or D-Cys
AXCEYCCTPACTGCY

SEQ ID NO: 510 - protein, 14 aa, Artificial Sequence
  Synthetically generated peptide
  misc_feature (2)..(2): Xaa can be Cys or D-Cys
  misc_feature (14)..(14): Xaa can be Cys or D-Cys
AXCEYCCTPACTGX

SEQ ID NO: 511 - protein, 15 aa, Artificial Sequence
  Synthetically generated peptide
  misc_feature (2)..(2): Xaa can be Cys or D-Cys
  misc_feature (14)..(14): Xaa can be Cys or D-Cys
AXCEYCCTPACTGXK

SEQ ID NO: 512 - protein, 15 aa, Artificial Sequence
  Synthetically generated peptide
  misc_feature (2)..(2): Xaa can be Cys or D-Cys
  misc_feature (14)..(14): Xaa can be Cys or D-Cys
AXCEYCCTPACTGXY

SEQ ID NO: 513 - protein, 14 aa, Artificial Sequence
  Synthetically generated peptide
  misc_feature (2)..(2): Xaa can be Cys or D-Cys
  misc_feature (6)..(6): Xaa can be Cys or D-Cys
AXCEYXCNPACTGC

SEQ ID NO: 514 - protein, 15 aa, Artificial Sequence
  Synthetically generated peptide
  misc_feature (2)..(2): Xaa can be Cys or D-Cys
  misc_feature (6)..(6): Xaa can be Cys or D-Cys
AXCEYXCNPACTGCK

SEQ ID NO: 515 - protein, 15 aa, Artificial Sequence
  Synthetically generated peptide
  misc_feature (2)..(2): Xaa can be Cys or D-Cys
  misc_feature (6)..(6): Xaa can be Cys or D-Cys
AXCEYXCNPACTGCY

SEQ ID NO: 516 - protein, 14 aa, Artificial Sequence
  Synthetically generated peptide
  misc_feature (2)..(2): Xaa can be Cys or D-Cys
  misc_feature (6)..(6): Xaa can be Cys or D-Cys
  misc_feature (14)..(14): Xaa can be Cys or D-Cys
AXCEYXCNPACTGX

SEQ ID NO: 517 - protein, 15 aa, Artificial Sequence
  Synthetically generated peptide
  misc_feature (2)..(2): Xaa can be Cys or D-Cys
  misc_feature (6)..(6): Xaa can be Cys or D-Cys
  misc_feature (14)..(14): Xaa can be Cys or D-Cys
AXCEYXCNPACTGXK

SEQ ID NO: 518 - protein, 15 aa, Artificial Sequence
  Synthetically generated peptide
  misc_feature (2)..(2): Xaa can be Cys or D-Cys
  misc_feature (6)..(6): Xaa can be Cys or D-Cys
  misc_feature (14)..(14): Xaa can be Cys or D-Cys
AXCEYXCNPACTGXY

SEQ ID NO: 519 - protein, 14 aa, Artificial Sequence
  Synthetically generated peptide
  misc_feature (2)..(2): Xaa can be Cys or D-Cys
  misc_feature (6)..(6): Xaa can be Cys or D-Cys
AXCEYXCTPACTGC

SEQ ID NO: 520 - protein, 15 aa, Artificial Sequence
  Synthetically generated peptide
  misc_feature (2)..(2): Xaa can be Cys or D-Cys
  misc_feature (6)..(6): Xaa can be Cys or D-Cys
AXCEYXCTPACTGCK

SEQ ID NO: 521 - protein, 15 aa, Artificial Sequence
  Synthetically generated peptide
  misc_feature (2)..(2): Xaa can be Cys or D-Cys
  misc_feature (6)..(6): Xaa can be Cys or D-Cys
AXCEYXCTPACTGCY

SEQ ID NO: 522 - protein, 14 aa, Artificial Sequence
  Synthetically generated peptide
  misc_feature (2)..(2): Xaa can be Cys or D-Cys
  misc_feature (6)..(6): Xaa can be Cys or D-Cys
  misc_feature (14)..(14): Xaa can be Cys or D-Cys
AXCEYXCTPACTGX

SEQ ID NO: 523 - protein, 15 aa, Artificial Sequence
  Synthetically generated peptide
  misc_feature (2)..(2): Xaa can be Cys or D-Cys
  misc_feature (6)..(6): Xaa can be Cys or D-Cys
  misc_feature (14)..(14): Xaa can be Cys or D-Cys
AXCEYXCTPACTGXK

SEQ ID NO: 524 - protein, 15 aa, Artificial Sequence
  Synthetically generated peptide
  misc_feature (2)..(2): Xaa can be Cys or D-Cys
  misc_feature (6)..(6): Xaa can be Cys or D-Cys
  misc_feature (14)..(14): Xaa can be Cys or D-Cys
AXCEYXCTPACTGXY

SEQ ID NO: 525 - protein, 14 aa, Artificial Sequence
  Synthetically generated peptide
  misc_feature (2)..(2): Xaa can be Cys or D-Cys
AXCEFCCNPACTGC

SEQ ID NO: 526 - protein, 15 aa, Artificial Sequence
  Synthetically generated peptide
  misc_feature (2)..(2): Xaa can be Cys or D-Cys
AXCEFCCNPACTGCK

SEQ ID NO: 527 - protein, 15 aa, Artificial Sequence
  Synthetically generated peptide
  misc_feature (2)..(2): Xaa can be Cys or D-Cys
AXCEFCCNPACTGCY

SEQ ID NO: 528 - protein, 14 aa, Artificial Sequence
  Synthetically generated peptide
  misc_feature (2)..(2): Xaa can be Cys or D-Cys
  misc_feature (14)..(14): Xaa can be Cys or D-Cys
AXCEFCCNPACTGX

SEQ ID NO: 529 - protein, 15 aa, Artificial Sequence
  Synthetically generated peptide
  misc_feature (2)..(2): Xaa can be Cys or D-Cys
  misc_feature (14)..(14): Xaa can be Cys or D-Cys
AXCEFCCNPACTGXK

SEQ ID NO: 530 - protein, 15 aa, Artificial Sequence
  Synthetically generated peptide
  misc_feature (2)..(2): Xaa can be Cys or D-Cys
  misc_feature (14)..(14): Xaa can be Cys or D-Cys
AXCEFCCNPACTGXY

SEQ ID NO: 531 - protein, 14 aa, Artificial Sequence
  Synthetically generated peptide
  misc_feature (2)..(2): Xaa can be Cys or D-Cys
AXCEFCCTPACTGC

SEQ ID NO: 532 - protein, 15 aa, Artificial Sequence
  Synthetically generated peptide
  misc_feature (2)..(2): Xaa can be Cys or D-Cys
AXCEFCCTPACTGCK

SEQ ID NO: 533 - protein, 15 aa, Artificial Sequence
  Synthetically generated peptide
  misc_feature (2)..(2): Xaa can be Cys or D-Cys
AXCEFCCTPACTGCY

SEQ ID NO: 534 - protein, 14 aa, Artificial Sequence
  Synthetically generated peptide
  misc_feature (2)..(2): Xaa can be Cys or D-Cys
  misc_feature (14)..(14): Xaa can be Cys or D-Cys
AXCEFCCTPACTGX

SEQ ID NO: 535 - protein, 15 aa, Artificial Sequence
  Synthetically generated peptide
  misc_feature (2)..(2): Xaa can be Cys or D-Cys
  misc_feature (14)..(14): Xaa can be Cys or D-Cys
AXCEFCCTPACTGXK

SEQ ID NO: 536 - protein, 15 aa, Artificial Sequence
  Synthetically generated peptide
  misc_feature (2)..(2): Xaa can be Cys or D-Cys
  misc_feature (14)..(14): Xaa can be Cys or D-Cys
AXCEFCCTPACTGXY

SEQ ID NO: 537 - protein, 14 aa, Artificial Sequence
  Synthetically generated peptide
  misc_feature (2)..(2): Xaa can be Cys or D-Cys
  misc_feature (6)..(6): Xaa can be Cys or D-Cys
AXCEFXCNPACTGC

SEQ ID NO: 538 - protein, 15 aa, Artificial Sequence
  Synthetically generated peptide
  misc_feature (2)..(2): Xaa can be Cys or D-Cys
  misc_feature (6)..(6): Xaa can be Cys or D-Cys
AXCEFXCNPACTGCK

SEQ ID NO: 539 - protein, 15 aa, Artificial Sequence
  Synthetically generated peptide
  misc_feature (2)..(2): Xaa can be Cys or D-Cys
  misc_feature (6)..(6): Xaa can be Cys or D-Cys
AXCEFXCNPACTGCY

SEQ ID NO: 540 - protein, 14 aa, Artificial Sequence
  Synthetically generated peptide
  misc_feature (2)..(2): Xaa can be Cys or D-Cys
  misc_feature (6)..(6): Xaa can be Cys or D-Cys
  misc_feature (14)..(14): Xaa can be Cys or D-Cys
AXCEFXCNPACTGX

SEQ ID NO: 541 - protein, 15 aa, Artificial Sequence
  Synthetically generated peptide
  misc_feature (2)..(2): Xaa can be Cys or D-Cys
  misc_feature (6)..(6): Xaa can be Cys or D-Cys
  misc_feature (14)..(14): Xaa can be Cys or D-Cys
AXCEFXCNPACTGXK

SEQ ID NO: 542 - protein, 15 aa, Artificial Sequence
  Synthetically generated peptide
  misc_feature (2)..(2): Xaa can be Cys or D-Cys
  misc_feature (6)..(6): Xaa can be Cys or D-Cys
  misc_feature (14)..(14): Xaa can be Cys or D-Cys
AXCEFXCNPACTGXY

SEQ ID NO: 543 - protein, 14 aa, Artificial Sequence
  Synthetically generated peptide
  misc_feature (2)..(2): Xaa can be Cys or D-Cys
  misc_feature (6)..(6): Xaa can be Cys or D-Cys
AXCEFXCTPACTGC

SEQ ID NO: 544 - protein, 15 aa, Artificial Sequence
  Synthetically generated peptide
  misc_feature (2)..(2): Xaa can be Cys or D-Cys
  misc_feature (6)..(6): Xaa can be Cys or D-Cys
AXCEFXCTPACTGCK

SEQ ID NO: 545 - protein, 15 aa, Artificial Sequence
  Synthetically generated peptide
  misc_feature (2)..(2): Xaa can be Cys or D-Cys
  misc_feature (6)..(6): Xaa can be Cys or D-Cys
AXCEFXCTPACTGCY

SEQ ID NO: 546 - protein, 14 aa, Artificial Sequence
  Synthetically generated peptide
  misc_feature (2)..(2): Xaa can be Cys or D-Cys
  misc_feature (6)..(6): Xaa can be Cys or D-Cys
  misc_feature (14)..(14): Xaa can be Cys or D-Cys
AXCEFXCTPACTGX

SEQ ID NO: 547 - protein, 15 aa, Artificial Sequence
  Synthetically generated peptide
  misc_feature (2)..(2): Xaa can be Cys or D-Cys
  misc_feature (6)..(6): Xaa can be Cys or D-Cys
  misc_feature (14)..(14): Xaa can be Cys or D-Cys
AXCEFXCTPACTGXK

SEQ ID NO: 548 - protein, 15 aa, Artificial Sequence
  Synthetically generated peptide
  misc_feature (2)..(2): Xaa can be Cys or D-Cys
  misc_feature (6)..(6): Xaa can be Cys or D-Cys
  misc_feature (14)..(14): Xaa can be Cys or D-Cys
AXCEFXCTPACTGXY

SEQ ID NO: 549 - protein, 14 aa, Artificial Sequence
  Synthetically generated peptide
  misc_feature (2)..(2): Xaa can be Cys or D-Cys
AXCEWCCNPACTGC

SEQ ID NO: 550 - protein, 15 aa, Artificial Sequence
  Synthetically generated peptide
  misc_feature (2)..(2): Xaa can be Cys or D-Cys
AXCEWCCNPACTGCK

SEQ ID NO: 551 - protein, 15 aa, Artificial Sequence
  Synthetically generated peptide
  misc_feature (2)..(2): Xaa can be Cys or D-Cys
AXCEWCCNPACTGCY

SEQ ID NO: 552 - protein, 14 aa, Artificial Sequence
  Synthetically generated peptide
  misc_feature (2)..(2): Xaa can be Cys or D-Cys
  misc_feature (14)..(14): Xaa can be Cys or D-Cys
AXCEWCCNPACTGX

SEQ ID NO: 553 - protein, 15 aa, Artificial Sequence
  Synthetically generated peptide
  misc_feature (2)..(2): Xaa can be Cys or D-Cys
  misc_feature (14)..(14): Xaa can be Cys or D-Cys
AXCEWCCNPACTGXK

SEQ ID NO: 554 - protein, 15 aa, Artificial Sequence
  Synthetically generated peptide
  misc_feature (2)..(2): Xaa can be Cys or D-Cys
  misc_feature (14)..(14): Xaa can be Cys or D-Cys
AXCEWCCNPACTGXY

SEQ ID NO: 555 - protein, 14 aa, Artificial Sequence
  Synthetically generated peptide
  misc_feature (2)..(2): Xaa can be Cys or D-Cys
AXCEWCCTPACTGC

SEQ ID NO: 556 - protein, 15 aa, Artificial Sequence
  Synthetically generated peptide
  misc_feature (2)..(2): Xaa can be Cys or D-Cys
AXCEWCCTPACTGCK

SEQ ID NO: 557 - protein, 15 aa, Artificial Sequence
  Synthetically generated peptide
  misc_feature (2)..(2): Xaa can be Cys or D-Cys
AXCEWCCTPACTGCY

SEQ ID NO: 558 - protein, 14 aa, Artificial Sequence
  Synthetically generated peptide
  misc_feature (2)..(2): Xaa can be Cys or D-Cys
  misc_feature (14)..(14): Xaa can be Cys or D-Cys
AXCEWCCTPACTGX

SEQ ID NO: 559 - protein, 15 aa, Artificial Sequence
  Synthetically generated peptide
  misc_feature (2)..(2): Xaa can be Cys or D-Cys
  misc_feature (14)..(14): Xaa can be Cys or D-Cys
AXCEWCCTPACTGXK

SEQ ID NO: 560 - protein, 15 aa, Artificial Sequence
  Synthetically generated peptide
  misc_feature (2)..(2): Xaa can be Cys or D-Cys
  misc_feature (14)..(14): Xaa can be Cys or D-Cys
AXCEWCCTPACTGXY

SEQ ID NO: 561 - protein, 14 aa, Artificial Sequence
  Synthetically generated peptide
  misc_feature (2)..(2): Xaa can be Cys or D-Cys
  misc_feature (6)..(6): Xaa can be Cys or D-Cys
AXCEWXCNPACTGC

SEQ ID NO: 562 - protein, 15 aa, Artificial Sequence
  Synthetically generated peptide
  misc_feature (2)..(2): Xaa can be Cys or D-Cys
  misc_feature (6)..(6): Xaa can be Cys or D-Cys
AXCEWXCNPACTGCK

SEQ ID NO: 563 - protein, 15 aa, Artificial Sequence
  Synthetically generated peptide
  misc_feature (2)..(2): Xaa can be Cys or D-Cys
  misc_feature (6)..(6): Xaa can be Cys or D-Cys
AXCEWXCNPACTGCY

SEQ ID NO: 564 - protein, 14 aa, Artificial Sequence
  Synthetically generated peptide
  misc_feature (2)..(2): Xaa can be Cys or D-Cys
  misc_feature (6)..(6): Xaa can be Cys or D-Cys
  misc_feature (14)..(14): Xaa can be Cys or D-Cys
AXCEWXCNPACTGX

SEQ ID NO: 565 - protein, 15 aa, Artificial Sequence
  Synthetically generated peptide
  misc_feature (2)..(2): Xaa can be Cys or D-Cys
  misc_feature (6)..(6): Xaa can be Cys or D-Cys
  misc_feature (14)..(14): Xaa can be Cys or D-Cys
AXCEWXCNPACTGXK

SEQ ID NO: 566 - protein, 15 aa, Artificial Sequence
  Synthetically generated peptide
  misc_feature (2)..(2): Xaa can be Cys or D-Cys
  misc_feature (6)..(6): Xaa can be Cys or D-Cys
  misc_feature (14)..(14): Xaa can be Cys or D-Cys
AXCEWXCNPACTGXY

SEQ ID NO: 567 - protein, 14 aa, Artificial Sequence
  Synthetically generated peptide
  misc_feature (2)..(2): Xaa can be Cys or D-Cys
  misc_feature (6)..(6): Xaa can be Cys or D-Cys
AXCEWXCTPACTGC

SEQ ID NO: 568 - protein, 15 aa, Artificial Sequence
  Synthetically generated peptide
  misc_feature (2)..(2): Xaa can be Cys or D-Cys
  misc_feature (6)..(6): Xaa can be Cys or D-Cys
AXCEWXCTPACTGCK

SEQ ID NO: 569 - protein, 15 aa, Artificial Sequence
  Synthetically generated peptide
  misc_feature (2)..(2): Xaa can be Cys or D-Cys
  misc_feature (6)..(6): Xaa can be Cys or D-Cys
AXCEWXCTPACTGCY

SEQ ID NO: 570 - protein, 14 aa, Artificial Sequence
  Synthetically generated peptide
  misc_feature (2)..(2): Xaa can be Cys or D-Cys
  misc_feature (6)..(6): Xaa can be Cys or D-Cys
  misc_feature (14)..(14): Xaa can be Cys or D-Cys
AXCEWXCTPACTGX

SEQ ID NO: 571 - protein, 15 aa, Artificial Sequence
  Synthetically generated peptide
  misc_feature (2)..(2): Xaa can be Cys or D-Cys
  misc_feature (6)..(6): Xaa can be Cys or D-Cys
  misc_feature (14)..(14): Xaa can be Cys or D-Cys
AXCEWXCTPACTGXK

SEQ ID NO: 572 - protein, 15 aa, Artificial Sequence
  Synthetically generated peptide
  misc_feature (2)..(2): Xaa can be Cys or D-Cys
  misc_feature (6)..(6): Xaa can be Cys or D-Cys
  misc_feature (14)..(14): Xaa can be Cys or D-Cys
AXCEWXCTPACTGXY

SEQ ID NO: 573 - protein, 14 aa, Artificial Sequence
  Synthetically generated peptide
GCCEVCCNPACTGC

SEQ ID NO: 574 - protein, 15 aa, Artificial Sequence
  Synthetically generated peptide
GCCEVCCNPACTGCK

SEQ ID NO: 575 - protein, 15 aa, Artificial Sequence
  Synthetically generated peptide
GCCEVCCNPACTGCY

SEQ ID NO: 576 - protein, 14 aa, Artificial Sequence
  Synthetically generated peptide
  misc_feature (14)..(14): Xaa can be Cys or D-Cys
GCCEVCCNPACTGX

SEQ ID NO: 577 - protein, 15 aa, Artificial Sequence
  Synthetically generated peptide
  misc_feature (14)..(14): Xaa can be Cys or D-Cys
GCCEVCCNPACTGXK

SEQ ID NO: 578 - protein, 15 aa, Artificial Sequence
  Synthetically generated peptide
  misc_feature (14)..(14): Xaa can be Cys or D-Cys
GCCEVCCNPACTGXY

SEQ ID NO: 579 - protein, 14 aa, Artificial Sequence
  Synthetically generated peptide
GCCEVCCTPACTGC

SEQ ID NO: 580 - protein, 15 aa, Artificial Sequence
  Synthetically generated peptide
GCCEVCCTPACTGCK

SEQ ID NO: 581 - protein, 15 aa, Artificial Sequence
  Synthetically generated peptide
GCCEVCCTPACTGCY

SEQ ID NO: 582 - protein, 14 aa, Artificial Sequence
  Synthetically generated peptide
  misc_feature (14)..(14): Xaa can be Cys or D-Cys
GCCEVCCTPACTGX

SEQ ID NO: 583 - protein, 15 aa, Artificial Sequence
  Synthetically generated peptide
  misc_feature (14)..(14): Xaa can be Cys or D-Cys
GCCEVCCTPACTGXK

SEQ ID NO: 584 - protein, 15 aa, Artificial Sequence
  Synthetically generated peptide
  misc_feature (14)..(14): Xaa can be Cys or D-Cys
GCCEVCCTPACTGXY

SEQ ID NO: 585 - protein, 14 aa, Artificial Sequence
  Synthetically generated peptide
  misc_feature (6)..(6): Xaa can be Cys or D-Cys
GCCEVXCNPACTGC

SEQ ID NO: 586 - protein, 15 aa, Artificial Sequence
  Synthetically generated peptide
  misc_feature (6)..(6): Xaa can be Cys or D-Cys
GCCEVXCNPACTGCK

SEQ ID NO: 587 - protein, 15 aa, Artificial Sequence
  Synthetically generated peptide
  misc_feature (6)..(6): Xaa can be Cys or D-Cys
GCCEVXCNPACTGCY

SEQ ID NO: 588 - protein, 14 aa, Artificial Sequence
  Synthetically generated peptide
  misc_feature (6)..(6): Xaa can be Cys or D-Cys
  misc_feature (14)..(14): Xaa can be Cys or D-Cys
GCCEVXCNPACTGX

SEQ ID NO: 589 - protein, 15 aa, Artificial Sequence
  Synthetically generated peptide
  misc_feature (6)..(6): Xaa can be Cys or D-Cys
  misc_feature (14)..(14): Xaa can be Cys or D-Cys
GCCEVXCNPACTGXK

SEQ ID NO: 590 - protein, 15 aa, Artificial Sequence
  Synthetically generated peptide
  misc_feature (6)..(6): Xaa can be Cys or D-Cys
  misc_feature (14)..(14): Xaa can be Cys or D-Cys
GCCEVXCNPACTGXY

SEQ ID NO: 591 - protein, 14 aa, Artificial Sequence
  Synthetically generated peptide
  misc_feature (6)..(6): Xaa can be Cys or D-Cys
GCCEVXCTPACTGC

SEQ ID NO: 592 - protein, 15 aa, Artificial Sequence
  Synthetically generated peptide
  misc_feature (6)..(6): Xaa can be Cys or D-Cys
GCCEVXCTPACTGCK

SEQ ID NO: 593 - protein, 15 aa, Artificial Sequence
  Synthetically generated peptide
  misc_feature (6)..(6): Xaa can be Cys or D-Cys
GCCEVXCTPACTGCY

SEQ ID NO: 594 - protein, 14 aa, Artificial Sequence
  Synthetically generated peptide
  misc_feature (6)..(6): Xaa can be Cys or D-Cys
  misc_feature (14)..(14): Xaa can be Cys or D-Cys
GCCEVXCTPACTGX

SEQ ID NO: 595 - protein, 15 aa, Artificial Sequence
  Synthetically generated peptide
  misc_feature (6)..(6): Xaa can be Cys or D-Cys
  misc_feature (14)..(14): Xaa can be Cys or D-Cys
GCCEVXCTPACTGXK

SEQ ID NO: 596 - protein, 15 aa, Artificial Sequence
  Synthetically generated peptide
  misc_feature (6)..(6): Xaa can be Cys or D-Cys
  misc_feature (14)..(14): Xaa can be Cys or D-Cys
GCCEVXCTPACTGXY

SEQ ID NO: 597 - protein, 14 aa, Artificial Sequence
  Synthetically generated peptide
GCCEICCNPACTGC

SEQ ID NO: 598 - protein, 15 aa, Artificial Sequence
  Synthetically generated peptide
GCCEICCNPACTGCK

SEQ ID NO: 599 - protein, 15 aa, Artificial Sequence
  Synthetically generated peptide
GCCEICCNPACTGCY

SEQ ID NO: 600 - protein, 14 aa, Artificial Sequence
  Synthetically generated peptide
  misc_feature (14)..(14): Xaa can be Cys or D-Cys
GCCEICCNPACTGX

SEQ ID NO: 601 - protein, 15 aa, Artificial Sequence
  Synthetically generated peptide
  misc_feature (14)..(14): Xaa can be Cys or D-Cys
GCCEICCNPACTGXK

SEQ ID NO: 602 - protein, 15 aa, Artificial Sequence
  Synthetically generated peptide
  misc_feature (14)..(14): Xaa can be Cys or D-Cys
GCCEICCNPACTGXY

SEQ ID NO: 603 - protein, 14 aa, Artificial Sequence
  Synthetically generated peptide
GCCEICCTPACTGC

SEQ ID NO: 604 - protein, 15 aa, Artificial Sequence
  Synthetically generated peptide
GCCEICCTPACTGCK

SEQ ID NO: 605 - protein, 15 aa, Artificial Sequence
  Synthetically generated peptide
GCCEICCTPACTGCY

SEQ ID NO: 606 - protein, 14 aa, Artificial Sequence
  Synthetically generated peptide
  misc_feature (14)..(14): Xaa can be Cys or D-Cys
GCCEICCTPACTGX

SEQ ID NO: 607 - protein, 15 aa, Artificial Sequence
  Synthetically generated peptide
  misc_feature (14)..(14): Xaa can be Cys or D-Cys
GCCEICCTPACTGXK

SEQ ID NO: 608 - protein, 15 aa, Artificial Sequence
  Synthetically generated peptide
  misc_feature (14)..(14): Xaa can be Cys or D-Cys
GCCEICCTPACTGXY

SEQ ID NO: 609 - protein, 14 aa, Artificial Sequence
  Synthetically generated peptide
  misc_feature (6)..(6): Xaa can be Cys or D-Cys
GCCEIXCNPACTGC

SEQ ID NO: 610 - protein, 15 aa, Artificial Sequence
  Synthetically generated peptide
  misc_feature (6)..(6): Xaa can be Cys or D-Cys
GCCEIXCNPACTGCK

SEQ ID NO: 611 - protein, 15 aa, Artificial Sequence
  Synthetically generated peptide
  misc_feature (6)..(6): Xaa can be Cys or D-Cys
GCCEIXCNPACTGCY

SEQ ID NO: 612 - protein, 14 aa, Artificial Sequence
  Synthetically generated peptide
  misc_feature (6)..(6): Xaa can be Cys or D-Cys
  misc_feature (14)..(14): Xaa can be Cys or D-Cys
GCCEIXCNPACTGX

SEQ ID NO: 613 - protein, 15 aa, Artificial Sequence
  Synthetically generated peptide
  misc_feature (6)..(6): Xaa can be Cys or D-Cys
  misc_feature (14)..(14): Xaa can be Cys or D-Cys
GCCEIXCNPACTGXK

SEQ ID NO: 614 - protein, 15 aa, Artificial Sequence
  Synthetically generated peptide
  misc_feature (6)..(6): Xaa can be Cys or D-Cys
  misc_feature (14)..(14): Xaa can be Cys or D-Cys
GCCEIXCNPACTGXY

SEQ ID NO: 615 - protein, 14 aa, Artificial Sequence
  Synthetically generated peptide
  misc_feature (6)..(6): Xaa can be Cys or D-Cys
GCCEIXCTPACTGC

SEQ ID NO: 616 - protein, 15 aa, Artificial Sequence
  Synthetically generated peptide
  misc_feature (6)..(6): Xaa can be Cys or D-Cys
GCCEIXCTPACTGCK

SEQ ID NO: 617 - protein, 15 aa, Artificial Sequence
  Synthetically generated peptide
  misc_feature (6)..(6): Xaa can be Cys or D-Cys
GCCEIXCTPACTGCY

SEQ ID NO: 618 - protein, 14 aa, Artificial Sequence
  Synthetically generated peptide
  misc_feature (6)..(6): Xaa can be Cys or D-Cys
  misc_feature (14)..(14): Xaa can be Cys or D-Cys
GCCEIXCTPACTGX

SEQ ID NO: 619 - protein, 15 aa, Artificial Sequence
  Synthetically generated peptide
  misc_feature (6)..(6): Xaa can be Cys or D-Cys
  misc_feature (14)..(14): Xaa can be Cys or D-Cys
GCCEIXCTPACTGXK

SEQ ID NO: 620 - protein, 15 aa, Artificial Sequence
  Synthetically generated peptide
  misc_feature (6)..(6): Xaa can be Cys or D-Cys
  misc_feature (14)..(14): Xaa can be Cys or D-Cys
GCCEIXCTPACTGXY

SEQ ID NO: 621 - protein, 14 aa, Artificial Sequence
  Synthetically generated peptide
GCCELCCNPACTGC

SEQ ID NO: 622 - protein, 15 aa, Artificial Sequence
  Synthetically generated peptide
GCCELCCNPACTGCK

SEQ ID NO: 623 - protein, 15 aa, Artificial Sequence
  Synthetically generated peptide
GCCELCCNPACTGCY

SEQ ID NO: 624 - protein, 14 aa, Artificial Sequence
  Synthetically generated peptide
  misc_feature (14)..(14): Xaa can be Cys or D-Cys
GCCELCCNPACTGX

SEQ ID NO: 625 - protein, 15 aa, Artificial Sequence
  Synthetically generated peptide
  misc_feature (14)..(14): Xaa can be Cys or D-Cys
GCCELCCNPACTGXK

SEQ ID NO: 626 - protein, 15 aa, Artificial Sequence
  Synthetically generated peptide
  misc_feature (14)..(14): Xaa can be Cys or D-Cys
GCCELCCNPACTGXY

SEQ ID NO: 627 - protein, 14 aa, Artificial Sequence
  Synthetically generated peptide
GCCELCCTPACTGC

SEQ ID NO: 628 - protein, 15 aa, Artificial Sequence
  Synthetically generated peptide
GCCELCCTPACTGCK

SEQ ID NO: 629 - protein, 15 aa, Artificial Sequence
  Synthetically generated peptide
GCCELCCTPACTGCY

SEQ ID NO: 630 - protein, 14 aa, Artificial Sequence
  Synthetically generated peptide
  misc_feature (14)..(14): Xaa can be Cys or D-Cys
GCCELCCTPACTGX

SEQ ID NO: 631 - protein, 15 aa, Artificial Sequence
  Synthetically generated peptide
  misc_feature (14)..(14): Xaa can be Cys or D-Cys
GCCELCCTPACTGXK

SEQ ID NO: 632 - protein, 15 aa, Artificial Sequence
  Synthetically generated peptide
  misc_feature (14)..(14): Xaa can be Cys or D-Cys
GCCELCCTPACTGXY

SEQ ID NO: 633 - protein, 14 aa, Artificial Sequence
  Synthetically generated peptide
  misc_feature (6)..(6): Xaa can be Cys or D-Cys
GCCELXCNPACTGC

SEQ ID NO: 634 - protein, 15 aa, Artificial Sequence
  Synthetically generated peptide
  misc_feature (6)..(6): Xaa can be Cys or D-Cys
GCCELXCNPACTGCK

SEQ ID NO: 635 - protein, 15 aa, Artificial Sequence
  Synthetically generated peptide
  misc_feature (6)..(6): Xaa can be Cys or D-Cys
GCCELXCNPACTGCY

SEQ ID NO: 636 - protein, 14 aa, Artificial Sequence
  Synthetically generated peptide
  misc_feature (6)..(6): Xaa can be Cys or D-Cys
  misc_feature (14)..(14): Xaa can be Cys or D-Cys
GCCELXCNPACTGX

SEQ ID NO: 637 - protein, 15 aa, Artificial Sequence
  Synthetically generated peptide
  misc_feature (6)..(6): Xaa can be Cys or D-Cys
  misc_feature (14)..(14): Xaa can be Cys or D-Cys
GCCELXCNPACTGXK

SEQ ID NO: 638 - protein, 15 aa, Artificial Sequence
  Synthetically generated peptide
  misc_feature (6)..(6): Xaa can be Cys or D-Cys
  misc_feature (14)..(14): Xaa can be Cys or D-Cys
GCCELXCNPACTGXY

SEQ ID NO: 639 - protein, 14 aa, Artificial Sequence
  Synthetically generated peptide
  misc_feature (6)..(6): Xaa can be Cys or D-Cys
GCCELXCTPACTGC

SEQ ID NO: 640 - protein, 15 aa, Artificial Sequence
  Synthetically generated peptide
  misc_feature (6)..(6): Xaa can be Cys or D-Cys
GCCELXCTPACTGCK

SEQ ID NO: 641 - protein, 15 aa, Artificial Sequence
  Synthetically generated peptide
  misc_feature (6)..(6): Xaa can be Cys or D-Cys
GCCELXCTPACTGCY

SEQ ID NO: 642 - protein, 14 aa, Artificial Sequence
  Synthetically generated peptide
  misc_feature (6)..(6): Xaa can be Cys or D-Cys
  misc_feature (14)..(14): Xaa can be Cys or D-Cys
GCCELXCTPACTGX

SEQ ID NO: 643 - protein, 15 aa, Artificial Sequence
  Synthetically generated peptide
  misc_feature (6)..(6): Xaa can be Cys or D-Cys
  misc_feature (14)..(14): Xaa can be Cys or D-Cys
GCCELXCTPACTGXK

SEQ ID NO: 644 - protein, 15 aa, Artificial Sequence
  Synthetically generated peptide
  misc_feature (6)..(6): Xaa can be Cys or D-Cys
  misc_feature (14)..(14): Xaa can be Cys or D-Cys
GCCELXCTPACTGXY

SEQ ID NO: 645 - protein, 14 aa, Artificial Sequence
  Synthetically generated peptide
GCCEYCCNPACTGC

SEQ ID NO: 646 - protein, 15 aa, Artificial Sequence
  Synthetically generated peptide
GCCEYCCNPACTGCK

SEQ ID NO: 647 - protein, 15 aa, Artificial Sequence
  Synthetically generated peptide
GCCEYCCNPACTGCY

SEQ ID NO: 648 - protein, 14 aa, Artificial Sequence
  Synthetically generated peptide
  misc_feature (14)..(14): Xaa can be Cys or D-Cys
GCCEYCCNPACTGX

SEQ ID NO: 649 - protein, 15 aa, Artificial Sequence
  Synthetically generated peptide
  misc_feature (14)..(14): Xaa can be Cys or D-Cys
GCCEYCCNPACTGXK

SEQ ID NO: 650 - protein, 15 aa, Artificial Sequence
  Synthetically generated peptide
  misc_feature (14)..(14): Xaa can be Cys or D-Cys
GCCEYCCNPACTGXY

SEQ ID NO: 651 - protein, 14 aa, Artificial Sequence
  Synthetically generated peptide
GCCEYCCTPACTGC

SEQ ID NO: 652 - protein, 15 aa, Artificial Sequence
  Synthetically generated peptide
GCCEYCCTPACTGCK

SEQ ID NO: 653 - protein, 15 aa, Artificial Sequence
  Synthetically generated peptide
GCCEYCCTPACTGCY

SEQ ID NO: 654 - protein, 14 aa, Artificial Sequence
  Synthetically generated peptide
  misc_feature (14)..(14): Xaa can be Cys or D-Cys
GCCEYCCTPACTGX

SEQ ID NO: 655 - protein, 15 aa, Artificial Sequence
  Synthetically generated peptide
  misc_feature (14)..(14): Xaa can be Cys or D-Cys
GCCEYCCTPACTGXK

SEQ ID NO: 656 - protein, 15 aa, Artificial Sequence
  Synthetically generated peptide
  misc_feature (14)..(14): Xaa can be Cys or D-Cys
GCCEYCCTPACTGXY

SEQ ID NO: 657 - protein, 14 aa, Artificial Sequence
  Synthetically generated peptide
  misc_feature (6)..(6): Xaa can be Cys or D-Cys
GCCEYXCNPACTGC

SEQ ID NO: 658 - protein, 15 aa, Artificial Sequence
  Synthetically generated peptide
  misc_feature (6)..(6): Xaa can be Cys or D-Cys
GCCEYXCNPACTGCK

SEQ ID NO: 659 - protein, 15 aa, Artificial Sequence
  Synthetically generated peptide
  misc_feature (6)..(6): Xaa can be Cys or D-Cys
GCCEYXCNPACTGCY

SEQ ID NO: 660 - protein, 14 aa, Artificial Sequence
  Synthetically generated peptide
  misc_feature (6)..(6): Xaa can be Cys or D-Cys
  misc_feature (14)..(14): Xaa can be Cys or D-Cys
GCCEYXCNPACTGX

SEQ ID NO: 661 - protein, 15 aa, Artificial Sequence
  Synthetically generated peptide
  misc_feature (6)..(6): Xaa can be Cys or D-Cys
  misc_feature (14)..(14): Xaa can be Cys or D-Cys
GCCEYXCNPACTGXK

SEQ ID NO: 662 - protein, 15 aa, Artificial Sequence
  Synthetically generated peptide
  misc_feature (6)..(6): Xaa can be Cys or D-Cys
  misc_feature (14)..(14): Xaa can be Cys or D-Cys
GCCEYXCNPACTGXY

SEQ ID NO: 663 - protein, 14 aa, Artificial Sequence
  Synthetically generated peptide
  misc_feature (6)..(6): Xaa can be Cys or D-Cys
GCCEYXCTPACTGC

SEQ ID NO: 664 - protein, 15 aa, Artificial Sequence
  Synthetically generated peptide
  misc_feature (6)..(6): Xaa can be Cys or D-Cys
GCCEYXCTPACTGCK

SEQ ID NO: 665 - protein, 15 aa, Artificial Sequence
  Synthetically generated peptide
  misc_feature (6)..(6): Xaa can be Cys or D-Cys
GCCEYXCTPACTGCY

SEQ ID NO: 666 - protein, 14 aa, Artificial Sequence
  Synthetically generated peptide
  misc_feature (6)..(6): Xaa can be Cys or D-Cys
  misc_feature (14)..(14): Xaa can be Cys or D-Cys
GCCEYXCTPACTGX

SEQ ID NO: 667 - protein, 15 aa, Artificial Sequence
  Synthetically generated peptide
  misc_feature (6)..(6): Xaa can be Cys or D-Cys
  misc_feature (14)..(14): Xaa can be Cys or D-Cys
GCCEYXCTPACTGXK

SEQ ID NO: 668 - protein, 15 aa, Artificial Sequence
  Synthetically generated peptide
  misc_feature (6)..(6): Xaa can be Cys or D-Cys
  misc_feature (14)..(14): Xaa can be Cys or D-Cys
GCCEYXCTPACTGXY

SEQ ID NO: 669 - protein, 14 aa, Artificial Sequence
  Synthetically generated peptide
GCCEFCCNPACTGC

SEQ ID NO: 670 - protein, 15 aa, Artificial Sequence
  Synthetically generated peptide
GCCEFCCNPACTGCK

SEQ ID NO: 671 - protein, 15 aa, Artificial Sequence
  Synthetically generated peptide
GCCEFCCNPACTGCY

SEQ ID NO: 672 - protein, 14 aa, Artificial Sequence
  Synthetically generated peptide
  misc_feature (14)..(14): Xaa can be Cys or D-Cys
GCCEFCCNPACTGX

SEQ ID NO: 673 - protein, 15 aa, Artificial Sequence
  Synthetically generated peptide
  misc_feature (14)..(14): Xaa can be Cys or D-Cys
GCCEFCCNPACTGXK

SEQ ID NO: 674 - protein, 15 aa, Artificial Sequence
  Synthetically generated peptide
  misc_feature (14)..(14): Xaa can be Cys or D-Cys
GCCEFCCNPACTGXY

SEQ ID NO: 675 - protein, 14 aa, Artificial Sequence
  Synthetically generated peptide
GCCEFCCTPACTGC

SEQ ID NO: 676 - protein, 15 aa, Artificial Sequence
  Synthetically generated peptide
GCCEFCCTPACTGCK

SEQ ID NO: 677 - protein, 15 aa, Artificial Sequence
  Synthetically generated peptide
GCCEFCCTPACTGCY

SEQ ID NO: 678 - protein, 14 aa, Artificial Sequence
  Synthetically generated peptide
  misc_feature (14)..(14): Xaa can be Cys or D-Cys
GCCEFCCTPACTGX

SEQ ID NO: 679 - protein, 15 aa, Artificial Sequence
  Synthetically generated peptide
  misc_feature (14)..(14): Xaa can be Cys or D-Cys
GCCEFCCTPACTGXK

SEQ ID NO: 680 - protein, 15 aa, Artificial Sequence
  Synthetically generated peptide
  misc_feature (14)..(14): Xaa can be Cys or D-Cys
GCCEFCCTPACTGXY

SEQ ID NO: 681 - protein, 14 aa, Artificial Sequence
  Synthetically generated peptide
  misc_feature (6)..(6): Xaa can be Cys or D-Cys
GCCEFXCNPACTGC

SEQ ID NO: 682 - protein, 15 aa, Artificial Sequence
  Synthetically generated peptide
  misc_feature (6)..(6): Xaa can be Cys or D-Cys
GCCEFXCNPACTGCK

SEQ ID NO: 683 - protein, 15 aa, Artificial Sequence
  Synthetically generated peptide
  misc_feature (6)..(6): Xaa can be Cys or D-Cys
GCCEFXCNPACTGCY

SEQ ID NO: 684 - protein, 14 aa, Artificial Sequence
  Synthetically generated peptide
  misc_feature (6)..(6): Xaa can be Cys or D-Cys
  misc_feature (14)..(14): Xaa can be Cys or D-Cys
GCCEFXCNPACTGX

SEQ ID NO: 685 - protein, 15 aa, Artificial Sequence
  Synthetically generated peptide
  misc_feature (6)..(6): Xaa can be Cys or D-Cys
  misc_feature (14)..(14): Xaa can be Cys or D-Cys
GCCEFXCNPACTGXK

SEQ ID NO: 686 - protein, 15 aa, Artificial Sequence
  Synthetically generated peptide
  misc_feature (6)..(6): Xaa can be Cys or D-Cys
  misc_feature (14)..(14): Xaa can be Cys or D-Cys
GCCEFXCNPACTGXY

SEQ ID NO: 687 - protein, 14 aa, Artificial Sequence
  Synthetically generated peptide
  misc_feature (6)..(6): Xaa can be Cys or D-Cys
GCCEFXCTPACTGC

SEQ ID NO: 688 - protein, 15 aa, Artificial Sequence
  Synthetically generated peptide
  misc_feature (6)..(6): Xaa can be Cys or D-Cys
GCCEFXCTPACTGCK

SEQ ID NO: 689 - protein, 15 aa, Artificial Sequence
  Synthetically generated peptide
  misc_feature (6)..(6): Xaa can be Cys or D-Cys
GCCEFXCTPACTGCY

SEQ ID NO: 690 - protein, 14 aa, Artificial Sequence
  Synthetically generated peptide
  misc_feature (6)..(6): Xaa can be Cys or D-Cys
  misc_feature (14)..(14): Xaa can be Cys or D-Cys
GCCEFXCTPACTGX

SEQ ID NO: 691 - protein, 15 aa, Artificial Sequence
  Synthetically generated peptide
  misc_feature (6)..(6): Xaa can be Cys or D-Cys
  misc_feature (14)..(14): Xaa can be Cys or D-Cys
GCCEFXCTPACTGXK

SEQ ID NO: 692 - protein, 15 aa, Artificial Sequence
  Synthetically generated peptide
  misc_feature (6)..(6): Xaa can be Cys or D-Cys
  misc_feature (14)..(14): Xaa can be Cys or D-Cys
GCCEFXCTPACTGXY

SEQ ID NO: 693 - protein, 14 aa, Artificial Sequence
  Synthetically generated peptide
GCCEWCCNPACTGC

SEQ ID NO: 694 - protein, 15 aa, Artificial Sequence
  Synthetically generated peptide
GCCEWCCNPACTGCK

SEQ ID NO: 695 - protein, 15 aa, Artificial Sequence
  Synthetically generated peptide
GCCEWCCNPACTGCY

SEQ ID NO: 696 - protein, 14 aa, Artificial Sequence
  Synthetically generated peptide
  misc_feature (14)..(14): Xaa can be Cys or D-Cys
GCCEWCCNPACTGX

SEQ ID NO: 697 - protein, 15 aa, Artificial Sequence
  Synthetically generated peptide
  misc_feature (14)..(14): Xaa can be Cys or D-Cys
GCCEWCCNPACTGXK

SEQ ID NO: 698 - protein, 15 aa, Artificial Sequence
  Synthetically generated peptide
  misc_feature (14)..(14): Xaa can be Cys or D-Cys
GCCEWCCNPACTGXY

SEQ ID NO: 699 - protein, 14 aa, Artificial Sequence
  Synthetically generated peptide
GCCEWCCTPACTGC

SEQ ID NO: 700 - protein, 15 aa, Artificial Sequence
  Synthetically generated peptide
GCCEWCCTPACTGCK

SEQ ID NO: 701 - protein, 15 aa, Artificial Sequence
  Synthetically generated peptide
GCCEWCCTPACTGCY

SEQ ID NO: 702 - protein, 14 aa, Artificial Sequence
  Synthetically generated peptide
  misc_feature (14)..(14): Xaa can be Cys or D-Cys
GCCEWCCTPACTGX

SEQ ID NO: 703 - protein, 15 aa, Artificial Sequence
  Synthetically generated peptide
  misc_feature (14)..(14): Xaa can be Cys or D-Cys
GCCEWCCTPACTGXK

SEQ ID NO: 704 - protein, 15 aa, Artificial Sequence
  Synthetically generated peptide
  misc_feature (14)..(14): Xaa can be Cys or D-Cys
GCCEWCCTPACTGXY

SEQ ID NO: 705 - protein, 14 aa, Artificial Sequence
  Synthetically generated peptide
  misc_feature (6)..(6): Xaa can be Cys or D-Cys
GCCEWXCNPACTGC

SEQ ID NO: 706 - protein, 15 aa, Artificial Sequence
  Synthetically generated peptide
  misc_feature (6)..(6): Xaa can be Cys or D-Cys
GCCEWXCNPACTGCK

SEQ ID NO: 707 - protein, 15 aa, Artificial Sequence
  Synthetically generated peptide
  misc_feature (6)..(6): Xaa can be Cys or D-Cys
GCCEWXCNPACTGCY

SEQ ID NO: 708 - protein, 14 aa, Artificial Sequence
  Synthetically generated peptide
  misc_feature (6)..(6): Xaa can be Cys or D-Cys
  misc_feature (14)..(14): Xaa can be Cys or D-Cys
GCCEWXCNPACTGX

SEQ ID NO: 709 - protein, 15 aa, Artificial Sequence
  Synthetically generated peptide
  misc_feature (6)..(6): Xaa can be Cys or D-Cys
  misc_feature (14)..(14): Xaa can be Cys or D-Cys
GCCEWXCNPACTGXK

SEQ ID NO: 710 - protein, 15 aa, Artificial Sequence
  Synthetically generated peptide
  misc_feature (6)..(6): Xaa can be Cys or D-Cys
  misc_feature (14)..(14): Xaa can be Cys or D-Cys
GCCEWXCNPACTGXY

SEQ ID NO: 711 - protein, 14 aa, Artificial Sequence
  Synthetically generated peptide
  misc_feature (6)..(6): Xaa can be Cys or D-Cys
GCCEWXCTPACTGC

SEQ ID NO: 712 - protein, 15 aa, Artificial Sequence
  Synthetically generated peptide
  misc_feature (6)..(6): Xaa can be Cys or D-Cys
GCCEWXCTPACTGCK

SEQ ID NO: 713 - protein, 15 aa, Artificial Sequence
  Synthetically generated peptide
  misc_feature (6)..(6): Xaa can be Cys or D-Cys
GCCEWXCTPACTGCY

SEQ ID NO: 714 - protein, 14 aa, Artificial Sequence
  Synthetically generated peptide
  misc_feature (6)..(6): Xaa can be Cys or D-Cys
  misc_feature (14)..(14): Xaa can be Cys or D-Cys
GCCEWXCTPACTGX

SEQ ID NO: 715 - protein, 15 aa, Artificial Sequence
  Synthetically generated peptide
  misc_feature (6)..(6): Xaa can be Cys or D-Cys
  misc_feature (14)..(14): Xaa can be Cys or D-Cys
GCCEWXCTPACTGXK

SEQ ID NO: 716 - protein, 15 aa, Artificial Sequence
  Synthetically generated peptide
  misc_feature (6)..(6): Xaa can be Cys or D-Cys
  misc_feature (14)..(14): Xaa can be Cys or D-Cys
GCCEWXCTPACTGXY

SEQ ID NO: 717 - protein, 14 aa, Artificial Sequence
  Synthetically generated peptide
  misc_feature (2)..(2): Xaa can be Cys or D-Cys
GXCEVCCNPACTGC

SEQ ID NO: 718 - protein, 15 aa, Artificial Sequence
  Synthetically generated peptide
  misc_feature (2)..(2): Xaa can be Cys or D-Cys
GXCEVCCNPACTGCK

SEQ ID NO: 719 - protein, 15 aa, Artificial Sequence
  Synthetically generated peptide
  misc_feature (2)..(2): Xaa can be Cys or D-Cys
GXCEVCCNPACTGCY

SEQ ID NO: 720 - protein, 14 aa, Artificial Sequence
  Synthetically generated peptide
  misc_feature (2)..(2): Xaa can be Cys or D-Cys
  misc_feature (14)..(14): Xaa can be Cys or D-Cys
GXCEVCCNPACTGX

SEQ ID NO: 721 - protein, 15 aa, Artificial Sequence
  Synthetically generated peptide
  misc_feature (2)..(2): Xaa can be Cys or D-Cys
  misc_feature (14)..(14): Xaa can be Cys or D-Cys
GXCEVCCNPACTGXK

SEQ ID NO: 722 - protein, 15 aa, Artificial Sequence
  Synthetically generated peptide
  misc_feature (2)..(2): Xaa can be Cys or D-Cys
  misc_feature (14)..(14): Xaa can be Cys or D-Cys
GXCEVCCNPACTGXY

SEQ ID NO: 723 - protein, 14 aa, Artificial Sequence
  Synthetically generated peptide
  misc_feature (2)..(2): Xaa can be Cys or D-Cys
GXCEVCCTPACTGC

SEQ ID NO: 724 - protein, 15 aa, Artificial Sequence
  Synthetically generated peptide
  misc_feature (2)..(2): Xaa can be Cys or D-Cys
GXCEVCCTPACTGCK

SEQ ID NO: 725 - protein, 15 aa, Artificial Sequence
  Synthetically generated peptide
  misc_feature (2)..(2): Xaa can be Cys or D-Cys
GXCEVCCTPACTGCY

SEQ ID NO: 726 - protein, 14 aa, Artificial Sequence
  Synthetically generated peptide
  misc_feature (2)..(2): Xaa can be Cys or D-Cys
  misc_feature (14)..(14): Xaa can be Cys or D-Cys
GXCEVCCTPACTGX

SEQ ID NO: 727 - protein, 15 aa, Artificial Sequence
  Synthetically generated peptide
  misc_feature (2)..(2): Xaa can be Cys or D-Cys
  misc_feature (14)..(14): Xaa can be Cys or D-Cys
GXCEVCCTPACTGXK

SEQ ID NO: 728 - protein, 15 aa, Artificial Sequence
  Synthetically generated peptide
  misc_feature (2)..(2): Xaa can be Cys or D-Cys
  misc_feature (14)..(14): Xaa can be Cys or D-Cys
GXCEVCCTPACTGXY

SEQ ID NO: 729 - protein, 14 aa, Artificial Sequence
  Synthetically generated peptide
  misc_feature (2)..(2): Xaa can be Cys or D-Cys
  misc_feature (6)..(6): Xaa can be Cys or D-Cys
GXCEVXCNPACTGC

SEQ ID NO: 730 - protein, 15 aa, Artificial Sequence
  Synthetically generated peptide
  misc_feature (2)..(2): Xaa can be Cys or D-Cys
  misc_feature (6)..(6): Xaa can be Cys or D-Cys
GXCEVXCNPACTGCK

SEQ ID NO: 731 - protein, 15 aa, Artificial Sequence
  Synthetically generated peptide
  misc_feature (2)..(2): Xaa can be Cys or D-Cys
  misc_feature (6)..(6): Xaa can be Cys or D-Cys
GXCEVXCNPACTGCY

SEQ ID NO: 732 - protein, 14 aa, Artificial Sequence
  Synthetically generated peptide
  misc_feature (2)..(2): Xaa can be Cys or D-Cys
  misc_feature (6)..(6): Xaa can be Cys or D-Cys
  misc_feature (14)..(14): Xaa can be Cys or D-Cys
GXCEVXCNPACTGX

SEQ ID NO: 733 - protein, 15 aa, Artificial Sequence
  Synthetically generated peptide
  misc_feature (2)..(2): Xaa can be Cys or D-Cys
  misc_feature (6)..(6): Xaa can be Cys or D-Cys
  misc_feature (14)..(14): Xaa can be Cys or D-Cys
GXCEVXCNPACTGXK

SEQ ID NO: 734 - protein, 15 aa, Artificial Sequence
  Synthetically generated peptide
  misc_feature (2)..(2): Xaa can be Cys or D-Cys
  misc_feature (6)..(6): Xaa can be Cys or D-Cys
  misc_feature (14)..(14): Xaa can be Cys or D-Cys
GXCEVXCNPACTGXY

SEQ ID NO: 735 - protein, 14 aa, Artificial Sequence
  Synthetically generated peptide
  misc_feature (2)..(2): Xaa can be Cys or D-Cys
  misc_feature (6)..(6): Xaa can be Cys or D-Cys
GXCEVXCTPACTGC

SEQ ID NO: 736 - protein, 15 aa, Artificial Sequence
  Synthetically generated peptide
  misc_feature (2)..(2): Xaa can be Cys or D-Cys
  misc_feature (6)..(6): Xaa can be Cys or D-Cys
GXCEVXCTPACTGCK

SEQ ID NO: 737 - protein, 15 aa, Artificial Sequence
  Synthetically generated peptide
  misc_feature (2)..(2): Xaa can be Cys or D-Cys
  misc_feature (6)..(6): Xaa can be Cys or D-Cys
GXCEVXCTPACTGCY

SEQ ID NO: 738 - protein, 14 aa, Artificial Sequence
  Synthetically generated peptide
  misc_feature (2)..(2): Xaa can be Cys or D-Cys
  misc_feature (6)..(6): Xaa can be Cys or D-Cys
  misc_feature (14)..(14): Xaa can be Cys or D-Cys
GXCEVXCTPACTGX

SEQ ID NO: 739 - protein, 15 aa, Artificial Sequence
  Synthetically generated peptide
  misc_feature (2)..(2): Xaa can be Cys or D-Cys
  misc_feature (6)..(6): Xaa can be Cys or D-Cys
  misc_feature (14)..(14): Xaa can be Cys or D-Cys
GXCEVXCTPACTGXK

SEQ ID NO: 740 - protein, 15 aa, Artificial Sequence
  Synthetically generated peptide
  misc_feature (2)..(2): Xaa can be Cys or D-Cys
  misc_feature (6)..(6): Xaa can be Cys or D-Cys
  misc_feature (14)..(14): Xaa can be Cys or D-Cys
GXCEVXCTPACTGXY

SEQ ID NO: 741 - protein, 14 aa, Artificial Sequence
  Synthetically generated peptide
  misc_feature (2)..(2): Xaa can be Cys or D-Cys
GXCEICCNPACTGC

SEQ ID NO: 742 - protein, 15 aa, Artificial Sequence
  Synthetically generated peptide
  misc_feature (2)..(2): Xaa can be Cys or D-Cys
GXCEICCNPACTGCK

SEQ ID NO: 743 - protein, 15 aa, Artificial Sequence
  Synthetically generated peptide
  misc_feature (2)..(2): Xaa can be Cys or D-Cys
GXCEICCNPACTGCY

SEQ ID NO: 744 - protein, 14 aa, Artificial Sequence
  Synthetically generated peptide
  misc_feature (2)..(2): Xaa can be Cys or D-Cys
  misc_feature (14)..(14): Xaa can be Cys or D-Cys
GXCEICCNPACTGX

SEQ ID NO: 745 - protein, 15 aa, Artificial Sequence
  Synthetically generated peptide
  misc_feature (2)..(2): Xaa can be Cys or D-Cys
  misc_feature (14)..(14): Xaa can be Cys or D-Cys
GXCEICCNPACTGXK

SEQ ID NO: 746 - protein, 15 aa, Artificial Sequence
  Synthetically generated peptide
  misc_feature (2)..(2): Xaa can be Cys or D-Cys
  misc_feature (14)..(14): Xaa can be Cys or D-Cys
GXCEICCNPACTGXY

SEQ ID NO: 747 - protein, 14 aa, Artificial Sequence
  Synthetically generated peptide
  misc_feature (2)..(2): Xaa can be Cys or D-Cys
GXCEICCTPACTGC

SEQ ID NO: 748 - protein, 15 aa, Artificial Sequence
  Synthetically generated peptide
  misc_feature (2)..(2): Xaa can be Cys or D-Cys
GXCEICCTPACTGCK

SEQ ID NO: 749 - protein, 15 aa, Artificial Sequence
  Synthetically generated peptide
  misc_feature (2)..(2): Xaa can be Cys or D-Cys
GXCEICCTPACTGCY

SEQ ID NO: 750 - protein, 14 aa, Artificial Sequence
  Synthetically generated peptide
  misc_feature (2)..(2): Xaa can be Cys or D-Cys
  misc_feature (14)..(14): Xaa can be Cys or D-Cys
GXCEICCTPACTGX

SEQ ID NO: 751 - protein, 15 aa, Artificial Sequence
  Synthetically generated peptide
  misc_feature (2)..(2): Xaa can be Cys or D-Cys
  misc_feature (14)..(14): Xaa can be Cys or D-Cys
GXCEICCTPACTGXK

SEQ ID NO: 752 - protein, 15 aa, Artificial Sequence
  Synthetically generated peptide
  misc_feature (2)..(2): Xaa can be Cys or D-Cys
  misc_feature (14)..(14): Xaa can be Cys or D-Cys
GXCEICCTPACTGXY

SEQ ID NO: 753 - protein, 14 aa, Artificial Sequence
  Synthetically generated peptide
  misc_feature (2)..(2): Xaa can be Cys or D-Cys
  misc_feature (6)..(6): Xaa can be Cys or D-Cys
GXCEIXCNPACTGC

SEQ ID NO: 754 - protein, 15 aa, Artificial Sequence
  Synthetically generated peptide
  misc_feature (2)..(2): Xaa can be Cys or D-Cys
  misc_feature (6)..(6): Xaa can be Cys or D-Cys
GXCEIXCNPACTGCK

SEQ ID NO: 755 - protein, 15 aa, Artificial Sequence
  Synthetically generated peptide
  misc_feature (2)..(2): Xaa can be Cys or D-Cys
  misc_feature (6)..(6): Xaa can be Cys or D-Cys
GXCEIXCNPACTGCY

SEQ ID NO: 756 - protein, 14 aa, Artificial Sequence
  Synthetically generated peptide
  misc_feature (2)..(2): Xaa can be Cys or D-Cys
  misc_feature (6)..(6): Xaa can be Cys or D-Cys
  misc_feature (14)..(14): Xaa can be Cys or D-Cys
GXCEIXCNPACTGX

SEQ ID NO: 757 - protein, 15 aa, Artificial Sequence
  Synthetically generated peptide
  misc_feature (2)..(2): Xaa can be Cys or D-Cys
  misc_feature (6)..(6): Xaa can be Cys or D-Cys
  misc_feature (14)..(14): Xaa can be Cys or D-Cys
GXCEIXCNPACTGXK

SEQ ID NO: 758 - protein, 15 aa, Artificial Sequence
  Synthetically generated peptide
  misc_feature (2)..(2): Xaa can be Cys or D-Cys
  misc_feature (6)..(6): Xaa can be Cys or D-Cys
  misc_feature (14)..(14): Xaa can be Cys or D-Cys
GXCEIXCNPACTGXY

SEQ ID NO: 759 - protein, 14 aa, Artificial Sequence
  Synthetically generated peptide
  misc_feature (2)..(2): Xaa can be Cys or D-Cys
  misc_feature (6)..(6): Xaa can be Cys or D-Cys
GXCEIXCTPACTGC

SEQ ID NO: 760 - protein, 15 aa, Artificial Sequence
  Synthetically generated peptide
  misc_feature (2)..(2): Xaa can be Cys or D-Cys
  misc_feature (6)..(6): Xaa can be Cys or D-Cys
GXCEIXCTPACTGCK

SEQ ID NO: 761 - protein, 15 aa, Artificial Sequence
  Synthetically generated peptide
  misc_feature (2)..(2): Xaa can be Cys or D-Cys
  misc_feature (6)..(6): Xaa can be Cys or D-Cys
GXCEIXCTPACTGCY

SEQ ID NO: 762 - protein, 14 aa, Artificial Sequence
  Synthetically generated peptide
  misc_feature (2)..(2): Xaa can be Cys or D-Cys
  misc_feature (6)..(6): Xaa can be Cys or D-Cys
  misc_feature (14)..(14): Xaa can be Cys or D-Cys
GXCEIXCTPACTGX

SEQ ID NO: 763 - protein, 15 aa, Artificial Sequence
  Synthetically generated peptide
  misc_feature (2)..(2): Xaa can be Cys or D-Cys
  misc_feature (6)..(6): Xaa can be Cys or D-Cys
  misc_feature (14)..(14): Xaa can be Cys or D-Cys
GXCEIXCTPACTGXK

SEQ ID NO: 764 - protein, 15 aa, Artificial Sequence
  Synthetically generated peptide
  misc_feature (2)..(2): Xaa can be Cys or D-Cys
  misc_feature (6)..(6): Xaa can be Cys or D-Cys
  misc_feature (14)..(14): Xaa can be Cys or D-Cys
GXCEIXCTPACTGXY

SEQ ID NO: 765 - protein, 14 aa, Artificial Sequence
  Synthetically generated peptide
  misc_feature (2)..(2): Xaa can be Cys or D-Cys
GXCELCCNPACTGC

SEQ ID NO: 766 - protein, 15 aa, Artificial Sequence
  Synthetically generated peptide
  misc_feature (2)..(2): Xaa can be Cys or D-Cys
GXCELCCNPACTGCK

SEQ ID NO: 767 - protein, 15 aa, Artificial Sequence
  Synthetically generated peptide
  misc_feature (2)..(2): Xaa can be Cys or D-Cys
GXCELCCNPACTGCY

SEQ ID NO: 768 - protein, 14 aa, Artificial Sequence
  Synthetically generated peptide
  misc_feature (2)..(2): Xaa can be Cys or D-Cys
  misc_feature (14)..(14): Xaa can be Cys or D-Cys
GXCELCCNPACTGX

SEQ ID NO: 769 - protein, 15 aa, Artificial Sequence
  Synthetically generated peptide
  misc_feature (2)..(2): Xaa can be Cys or D-Cys
  misc_feature (14)..(14): Xaa can be Cys or D-Cys
GXCELCCNPACTGXK

SEQ ID NO: 770 - protein, 15 aa, Artificial Sequence
  Synthetically generated peptide
  misc_feature (2)..(2): Xaa can be Cys or D-Cys
  misc_feature (14)..(14): Xaa can be Cys or D-Cys
GXCELCCNPACTGXY

SEQ ID NO: 771 - protein, 14 aa, Artificial Sequence
  Synthetically generated peptide
  misc_feature (2)..(2): Xaa can be Cys or D-Cys
GXCELCCTPACTGC

SEQ ID NO: 772 - protein, 15 aa, Artificial Sequence
  Synthetically generated peptide
  misc_feature (2)..(2): Xaa can be Cys or D-Cys
GXCELCCTPACTGCK

SEQ ID NO: 773 - protein, 15 aa, Artificial Sequence
  Synthetically generated peptide
  misc_feature (2)..(2): Xaa can be Cys or D-Cys
GXCELCCTPACTGCY

SEQ ID NO: 774 - protein, 14 aa, Artificial Sequence
  Synthetically generated peptide
  misc_feature (2)..(2): Xaa can be Cys or D-Cys
  misc_feature (14)..(14): Xaa can be Cys or D-Cys
GXCELCCTPACTGX

SEQ ID NO: 775 - protein, 15 aa, Artificial Sequence
  Synthetically generated peptide
  misc_feature (2)..(2): Xaa can be Cys or D-Cys
  misc_feature (14)..(14): Xaa can be Cys or D-Cys
GXCELCCTPACTGXK

SEQ ID NO: 776 - protein, 15 aa, Artificial Sequence
  Synthetically generated peptide
  misc_feature (2)..(2): Xaa can be Cys or D-Cys
  misc_feature (14)..(14): Xaa can be Cys or D-Cys
GXCELCCTPACTGXY

SEQ ID NO: 777 - protein, 14 aa, Artificial Sequence
  Synthetically generated peptide
  misc_feature (2)..(2): Xaa can be Cys or D-Cys
  misc_feature (6)..(6): Xaa can be Cys or D-Cys
GXCELXCNPACTGC

SEQ ID NO: 778 - protein, 15 aa, Artificial Sequence
  Synthetically generated peptide
  misc_feature (2)..(2): Xaa can be Cys or D-Cys
  misc_feature (6)..(6): Xaa can be Cys or D-Cys
GXCELXCNPACTGCK

SEQ ID NO: 779 - protein, 15 aa, Artificial Sequence
  Synthetically generated peptide
  misc_feature (2)..(2): Xaa can be Cys or D-Cys
  misc_feature (6)..(6): Xaa can be Cys or D-Cys
GXCELXCNPACTGCY

SEQ ID NO: 780 - protein, 14 aa, Artificial Sequence
  Synthetically generated peptide
  misc_feature (2)..(2): Xaa can be Cys or D-Cys
  misc_feature (6)..(6): Xaa can be Cys or D-Cys
  misc_feature (14)..(14): Xaa can be Cys or D-Cys
GXCELXCNPACTGX

SEQ ID NO: 781 - protein, 15 aa, Artificial Sequence
  Synthetically generated peptide
  misc_feature (2)..(2): Xaa can be Cys or D-Cys
  misc_feature (6)..(6): Xaa can be Cys or D-Cys
  misc_feature (14)..(14): Xaa can be Cys or D-Cys
GXCELXCNPACTGXK

SEQ ID NO: 782 - protein, 15 aa, Artificial Sequence
  Synthetically generated peptide
  misc_feature (2)..(2): Xaa can be Cys or D-Cys
  misc_feature (6)..(6): Xaa can be Cys or D-Cys
  misc_feature (14)..(14): Xaa can be Cys or D-Cys
GXCELXCNPACTGXY

SEQ ID NO: 783 - protein, 14 aa, Artificial Sequence
  Synthetically generated peptide
  misc_feature (2)..(2): Xaa can be Cys or D-Cys
  misc_feature (6)..(6): Xaa can be Cys or D-Cys
GXCELXCTPACTGC

SEQ ID NO: 784 - protein, 15 aa, Artificial Sequence
  Synthetically generated peptide
  misc_feature (2)..(2): Xaa can be Cys or D-Cys
  misc_feature (6)..(6): Xaa can be Cys or D-Cys
GXCELXCTPACTGCK

SEQ ID NO: 785 - protein, 15 aa, Artificial Sequence
  Synthetically generated peptide
  misc_feature (2)..(2): Xaa can be Cys or D-Cys
  misc_feature (6)..(6): Xaa can be Cys or D-Cys
GXCELXCTPACTGCY

SEQ ID NO: 786 - protein, 14 aa, Artificial Sequence
  Synthetically generated peptide
  misc_feature (2)..(2): Xaa can be Cys or D-Cys
  misc_feature (6)..(6): Xaa can be Cys or D-Cys
  misc_feature (14)..(14): Xaa can be Cys or D-Cys
GXCELXCTPACTGX

SEQ ID NO: 787 - protein, 15 aa, Artificial Sequence
  Synthetically generated peptide
  misc_feature (2)..(2): Xaa can be Cys or D-Cys
  misc_feature (6)..(6): Xaa can be Cys or D-Cys
  misc_feature (14)..(14): Xaa can be Cys or D-Cys
GXCELXCTPACTGXK

SEQ ID NO: 788 - protein, 15 aa, Artificial Sequence
  Synthetically generated peptide
  misc_feature (2)..(2): Xaa can be Cys or D-Cys
  misc_feature (6)..(6): Xaa can be Cys or D-Cys
  misc_feature (14)..(14): Xaa can be Cys or D-Cys
GXCELXCTPACTGXY

SEQ ID NO: 789 - protein, 14 aa, Artificial Sequence
  Synthetically generated peptide
  misc_feature (2)..(2): Xaa can be Cys or D-Cys
GXCEYCCNPACTGC

SEQ ID NO: 790 - protein, 15 aa, Artificial Sequence
  Synthetically generated peptide
  misc_feature (2)..(2): Xaa can be Cys or D-Cys
GXCEYCCNPACTGCK

SEQ ID NO: 791 - protein, 15 aa, Artificial Sequence
  Synthetically generated peptide
  misc_feature (2)..(2): Xaa can be Cys or D-Cys
GXCEYCCNPACTGCY

SEQ ID NO: 792 - protein, 14 aa, Artificial Sequence
  Synthetically generated peptide
  misc_feature (2)..(2): Xaa can be Cys or D-Cys
  misc_feature (14)..(14): Xaa can be Cys or D-Cys
GXCEYCCNPACTGX

SEQ ID NO: 793 - protein, 15 aa, Artificial Sequence
  Synthetically generated peptide
  misc_feature (2)..(2): Xaa can be Cys or D-Cys
  misc_feature (14)..(14): Xaa can be Cys or D-Cys
GXCEYCCNPACTGXK

SEQ ID NO: 794 - protein, 15 aa, Artificial Sequence
  Synthetically generated peptide
  misc_feature (2)..(2): Xaa can be Cys or D-Cys
  misc_feature (14)..(14): Xaa can be Cys or D-Cys
GXCEYCCNPACTGXY

SEQ ID NO: 795 - protein, 14 aa, Artificial Sequence
  Synthetically generated peptide
  misc_feature (2)..(2): Xaa can be Cys or D-Cys
GXCEYCCTPACTGC

SEQ ID NO: 796 - protein, 15 aa, Artificial Sequence
  Synthetically generated peptide
  misc_feature (2)..(2): Xaa can be Cys or D-Cys
GXCEYCCTPACTGCK

SEQ ID NO: 797 - protein, 15 aa, Artificial Sequence
  Synthetically generated peptide
  misc_feature (2)..(2): Xaa can be Cys or D-Cys
GXCEYCCTPACTGCY

SEQ ID NO: 798 - protein, 14 aa, Artificial Sequence
  Synthetically generated peptide
  misc_feature (2)..(2): Xaa can be Cys or D-Cys
  misc_feature (14)..(14): Xaa can be Cys or D-Cys
GXCEYCCTPACTGX

SEQ ID NO: 799 - protein, 15 aa, Artificial Sequence
  Synthetically generated peptide
  misc_feature (2)..(2): Xaa can be Cys or D-Cys
  misc_feature (14)..(14): Xaa can be Cys or D-Cys
GXCEYCCTPACTGXK

SEQ ID NO: 800 - protein, 15 aa, Artificial Sequence
  Synthetically generated peptide
  misc_feature (2)..(2): Xaa can be Cys or D-Cys
  misc_feature (14)..(14): Xaa can be Cys or D-Cys
GXCEYCCTPACTGXY

SEQ ID NO: 801 - protein, 14 aa, Artificial Sequence
  Synthetically generated peptide
  misc_feature (2)..(2): Xaa can be Cys or D-Cys
  misc_feature (6)..(6): Xaa can be Cys or D-Cys
GXCEYXCNPACTGC

SEQ ID NO: 802 - protein, 15 aa, Artificial Sequence
  Synthetically generated peptide
  misc_feature (2)..(2): Xaa can be Cys or D-Cys
  misc_feature (6)..(6): Xaa can be Cys or D-Cys
GXCEYXCNPACTGCK

SEQ ID NO: 803 - protein, 15 aa, Artificial Sequence
  Synthetically generated peptide
  misc_feature (2)..(2): Xaa can be Cys or D-Cys
  misc_feature (6)..(6): Xaa can be Cys or D-Cys
GXCEYXCNPACTGCY

SEQ ID NO: 804 - protein, 14 aa, Artificial Sequence
  Synthetically generated peptide
  misc_feature (2)..(2): Xaa can be Cys or D-Cys
  misc_feature (6)..(6): Xaa can be Cys or D-Cys
  misc_feature (14)..(14): Xaa can be Cys or D-Cys
GXCEYXCNPACTGX

SEQ ID NO: 805 - protein, 15 aa, Artificial Sequence
  Synthetically generated peptide
  misc_feature (2)..(2): Xaa can be Cys or D-Cys
  misc_feature (6)..(6): Xaa can be Cys or D-Cys
  misc_feature (14)..(14): Xaa can be Cys or D-Cys
GXCEYXCNPACTGXK

SEQ ID NO: 806 - protein, 15 aa, Artificial Sequence
  Synthetically generated peptide
  misc_feature (2)..(2): Xaa can be Cys or D-Cys
  misc_feature (6)..(6): Xaa can be Cys or D-Cys
  misc_feature (14)..(14): Xaa can be Cys or D-Cys
GXCEYXCNPACTGXY

SEQ ID NO: 807 - protein, 14 aa, Artificial Sequence
  Synthetically generated peptide
  misc_feature (2)..(2): Xaa can be Cys or D-Cys
  misc_feature (6)..(6): Xaa can be Cys or D-Cys
GXCEYXCTPACTGC

SEQ ID NO: 808 - protein, 15 aa, Artificial Sequence
  Synthetically generated peptide
  misc_feature (2)..(2): Xaa can be Cys or D-Cys
  misc_feature (6)..(6): Xaa can be Cys or D-Cys
GXCEYXCTPACTGCK

SEQ ID NO: 809 - protein, 15 aa, Artificial Sequence
  Synthetically generated peptide
  misc_feature (2)..(2): Xaa can be Cys or D-Cys
  misc_feature (6)..(6): Xaa can be Cys or D-Cys
GXCEYXCTPACTGCY

SEQ ID NO: 810 - protein, 14 aa, Artificial Sequence
  Synthetically generated peptide
  misc_feature (2)..(2): Xaa can be Cys or D-Cys
  misc_feature (6)..(6): Xaa can be Cys or D-Cys
  misc_feature (14)..(14): Xaa can be Cys or D-Cys
GXCEYXCTPACTGX

SEQ ID NO: 811 - protein, 15 aa, Artificial Sequence
  Synthetically generated peptide
  misc_feature (2)..(2): Xaa can be Cys or D-Cys
  misc_feature (6)..(6): Xaa can be Cys or D-Cys
  misc_feature (14)..(14): Xaa can be Cys or D-Cys
GXCEYXCTPACTGXK

SEQ ID NO: 812 - protein, 15 aa, Artificial Sequence
  Synthetically generated peptide
  misc_feature (2)..(2): Xaa can be Cys or D-Cys
  misc_feature (6)..(6): Xaa can be Cys or D-Cys
  misc_feature (14)..(14): Xaa can be Cys or D-Cys
GXCEYXCTPACTGXY

SEQ ID NO: 813 - protein, 14 aa, Artificial Sequence
  Synthetically generated peptide
  misc_feature (2)..(2): Xaa can be Cys or D-Cys
GXCEFCCNPACTGC

SEQ ID NO: 814 - protein, 15 aa, Artificial Sequence
  Synthetically generated peptide
  misc_feature (2)..(2): Xaa can be Cys or D-Cys
GXCEFCCNPACTGCK

SEQ ID NO: 815 - protein, 15 aa, Artificial Sequence
  Synthetically generated peptide
  misc_feature (2)..(2): Xaa can be Cys or D-Cys
GXCEFCCNPACTGCY

SEQ ID NO: 816 - protein, 14 aa, Artificial Sequence
  Synthetically generated peptide
  misc_feature (2)..(2): Xaa can be Cys or D-Cys
  misc_feature (14)..(14): Xaa can be Cys or D-Cys
GXCEFCCNPACTGX

SEQ ID NO: 817 - protein, 15 aa, Artificial Sequence
  Synthetically generated peptide
  misc_feature (2)..(2): Xaa can be Cys or D-Cys
  misc_feature (14)..(14): Xaa can be Cys or D-Cys
GXCEFCCNPACTGXK

SEQ ID NO: 818 - protein, 15 aa, Artificial Sequence
  Synthetically generated peptide
  misc_feature (2)..(2): Xaa can be Cys or D-Cys
  misc_feature (14)..(14): Xaa can be Cys or D-Cys
GXCEFCCNPACTGXY

SEQ ID NO: 819 - protein, 14 aa, Artificial Sequence
  Synthetically generated peptide
  misc_feature (2)..(2): Xaa can be Cys or D-Cys
GXCEFCCTPACTGC

SEQ ID NO: 820 - protein, 15 aa, Artificial Sequence
  Synthetically generated peptide
  misc_feature (2)..(2): Xaa can be Cys or D-Cys
GXCEFCCTPACTGCK

SEQ ID NO: 821 - protein, 15 aa, Artificial Sequence
  Synthetically generated peptide
  misc_feature (2)..(2): Xaa can be Cys or D-Cys
GXCEFCCTPACTGCY

SEQ ID NO: 822 - protein, 14 aa, Artificial Sequence
  Synthetically generated peptide
  misc_feature (2)..(2): Xaa can be Cys or D-Cys
  misc_feature (14)..(14): Xaa can be Cys or D-Cys
GXCEFCCTPACTGX

SEQ ID NO: 823 - protein, 15 aa, Artificial Sequence
  Synthetically generated peptide
  misc_feature (2)..(2): Xaa can be Cys or D-Cys
  misc_feature (14)..(14): Xaa can be Cys or D-Cys
GXCEFCCTPACTGXK

SEQ ID NO: 824 - protein, 15 aa, Artificial Sequence
  Synthetically generated peptide
  misc_feature (2)..(2): Xaa can be Cys or D-Cys
  misc_feature (14)..(14): Xaa can be Cys or D-Cys
GXCEFCCTPACTGXY

SEQ ID NO: 825 - protein, 14 aa, Artificial Sequence
  Synthetically generated peptide
  misc_feature (2)..(2): Xaa can be Cys or D-Cys
  misc_feature (6)..(6): Xaa can be Cys or D-Cys
GXCEFXCNPACTGC

SEQ ID NO: 826 - protein, 15 aa, Artificial Sequence
  Synthetically generated peptide
  misc_feature (2)..(2): Xaa can be Cys or D-Cys
  misc_feature (6)..(6): Xaa can be Cys or D-Cys
GXCEFXCNPACTGCK

SEQ ID NO: 827 - protein, 15 aa, Artificial Sequence
  Synthetically generated peptide
  misc_feature (2)..(2): Xaa can be Cys or D-Cys
  misc_feature (6)..(6): Xaa can be Cys or D-Cys
GXCEFXCNPACTGCY

SEQ ID NO: 828 - protein, 14 aa, Artificial Sequence
  Synthetically generated peptide
  misc_feature (2)..(2): Xaa can be Cys or D-Cys
  misc_feature (6)..(6): Xaa can be Cys or D-Cys
  misc_feature (14)..(14): Xaa can be Cys or D-Cys
GXCEFXCNPACTGX

SEQ ID NO: 829 - protein, 15 aa, Artificial Sequence
  Synthetically generated peptide
  misc_feature (2)..(2): Xaa can be Cys or D-Cys
  misc_feature (6)..(6): Xaa can be Cys or D-Cys
  misc_feature (14)..(14): Xaa can be Cys or D-Cys
GXCEFXCNPACTGXK

SEQ ID NO: 830 - protein, 15 aa, Artificial Sequence
  Synthetically generated peptide
  misc_feature (2)..(2): Xaa can be Cys or D-Cys
  misc_feature (6)..(6): Xaa can be Cys or D-Cys
  misc_feature (14)..(14): Xaa can be Cys or D-Cys
GXCEFXCNPACTGXY

SEQ ID NO: 831 - protein, 14 aa, Artificial Sequence
  Synthetically generated peptide
  misc_feature (2)..(2): Xaa can be Cys or D-Cys
  misc_feature (6)..(6): Xaa can be Cys or D-Cys
GXCEFXCTPACTGC

SEQ ID NO: 832 - protein, 15 aa, Artificial Sequence
  Synthetically generated peptide
  misc_feature (2)..(2): Xaa can be Cys or D-Cys
  misc_feature (6)..(6): Xaa can be Cys or D-Cys
GXCEFXCTPACTGCK

SEQ ID NO: 833 - protein, 15 aa, Artificial Sequence
  Synthetically generated peptide
  misc_feature (2)..(2): Xaa can be Cys or D-Cys
  misc_feature (6)..(6): Xaa can be Cys or D-Cys
GXCEFXCTPACTGCY

SEQ ID NO: 834 - protein, 14 aa, Artificial Sequence
  Synthetically generated peptide
  misc_feature (2)..(2): Xaa can be Cys or D-Cys
  misc_feature (6)..(6): Xaa can be Cys or D-Cys
  misc_feature (14)..(14): Xaa can be Cys or D-Cys
GXCEFXCTPACTGX

SEQ ID NO: 835 - protein, 15 aa, Artificial Sequence
  Synthetically generated peptide
  misc_feature (2)..(2): Xaa can be Cys or D-Cys
  misc_feature (6)..(6): Xaa can be Cys or D-Cys
  misc_feature (14)..(14): Xaa can be Cys or D-Cys
GXCEFXCTPACTGXK

SEQ ID NO: 836 - protein, 15 aa, Artificial Sequence
  Synthetically generated peptide
  misc_feature (2)..(2): Xaa can be Cys or D-Cys
  misc_feature (6)..(6): Xaa can be Cys or D-Cys
  misc_feature (14)..(14): Xaa can be Cys or D-Cys
GXCEFXCTPACTGXY

SEQ ID NO: 837 - protein, 14 aa, Artificial Sequence
  Synthetically generated peptide
  misc_feature (2)..(2): Xaa can be Cys or D-Cys
GXCEWCCNPACTGC

SEQ ID NO: 838 - protein, 15 aa, Artificial Sequence
  Synthetically generated peptide
  misc_feature (2)..(2): Xaa can be Cys or D-Cys
GXCEWCCNPACTGCK

SEQ ID NO: 839 - protein, 15 aa, Artificial Sequence
  Synthetically generated peptide
  misc_feature (2)..(2): Xaa can be Cys or D-Cys
GXCEWCCNPACTGCY

SEQ ID NO: 840 - protein, 14 aa, Artificial Sequence
  Synthetically generated peptide
  misc_feature (2)..(2): Xaa can be Cys or D-Cys
  misc_feature (14)..(14): Xaa can be Cys or D-Cys
GXCEWCCNPACTGX

SEQ ID NO: 841 - protein, 15 aa, Artificial Sequence
  Synthetically generated peptide
  misc_feature (2)..(2): Xaa can be Cys or D-Cys
  misc_feature (14)..(14): Xaa can be Cys or D-Cys
GXCEWCCNPACTGXK

SEQ ID NO: 842 - protein, 15 aa, Artificial Sequence
  Synthetically generated peptide
  misc_feature (2)..(2): Xaa can be Cys or D-Cys
  misc_feature (14)..(14): Xaa can be Cys or D-Cys
GXCEWCCNPACTGXY

SEQ ID NO: 843 - protein, 14 aa, Artificial Sequence
  Synthetically generated peptide
  misc_feature (2)..(2): Xaa can be Cys or D-Cys
GXCEWCCTPACTGC

SEQ ID NO: 844 - protein, 15 aa, Artificial Sequence
  Synthetically generated peptide
  misc_feature (2)..(2): Xaa can be Cys or D-Cys
GXCEWCCTPACTGCK

SEQ ID NO: 845 - protein, 15 aa, Artificial Sequence
  Synthetically generated peptide
  misc_feature (2)..(2): Xaa can be Cys or D-Cys
GXCEWCCTPACTGCY

SEQ ID NO: 846 - protein, 14 aa, Artificial Sequence
  Synthetically generated peptide
  misc_feature (2)..(2): Xaa can be Cys or D-Cys
  misc_feature (14)..(14): Xaa can be Cys or D-Cys
GXCEWCCTPACTGX

SEQ ID NO: 847 - protein, 15 aa, Artificial Sequence
  Synthetically generated peptide
  misc_feature (2)..(2): Xaa can be Cys or D-Cys
  misc_feature (14)..(14): Xaa can be Cys or D-Cys
GXCEWCCTPACTGXK

SEQ ID NO: 848 - protein, 15 aa, Artificial Sequence
  Synthetically generated peptide
  misc_feature (2)..(2): Xaa can be Cys or D-Cys
  misc_feature (14)..(14): Xaa can be Cys or D-Cys
GXCEWCCTPACTGXY

SEQ ID NO: 849 - protein, 14 aa, Artificial Sequence
  Synthetically generated peptide
  misc_feature (2)..(2): Xaa can be Cys or D-Cys
  misc_feature (6)..(6): Xaa can be Cys or D-Cys
GXCEWXCNPACTGC

SEQ ID NO: 850 - protein, 15 aa, Artificial Sequence
  Synthetically generated peptide
  misc_feature (2)..(2): Xaa can be Cys or D-Cys
  misc_feature (6)..(6): Xaa can be Cys or D-Cys
GXCEWXCNPACTGCK

SEQ ID NO: 851 - protein, 15 aa, Artificial Sequence
  Synthetically generated peptide
  misc_feature (2)..(2): Xaa can be Cys or D-Cys
  misc_feature (6)..(6): Xaa can be Cys or D-Cys
GXCEWXCNPACTGCY

SEQ ID NO: 852 - protein, 14 aa, Artificial Sequence
  Synthetically generated peptide
  misc_feature (2)..(2): Xaa can be Cys or D-Cys
  misc_feature (6)..(6): Xaa can be Cys or D-Cys
  misc_feature (14)..(14): Xaa can be Cys or D-Cys
GXCEWXCNPACTGX

SEQ ID NO: 853 - protein, 15 aa, Artificial Sequence
  Synthetically generated peptide
  misc_feature (2)..(2): Xaa can be Cys or D-Cys
  misc_feature (6)..(6): Xaa can be Cys or D-Cys
  misc_feature (14)..(14): Xaa can be Cys or D-Cys
GXCEWXCNPACTGXK

SEQ ID NO: 854 - protein, 15 aa, Artificial Sequence
  Synthetically generated peptide
  misc_feature (2)..(2): Xaa can be Cys or D-Cys
  misc_feature (6)..(6): Xaa can be Cys or D-Cys
  misc_feature (14)..(14): Xaa can be Cys or D-Cys
GXCEWXCNPACTGXY

SEQ ID NO: 855 - protein, 14 aa, Artificial Sequence
  Synthetically generated peptide
  misc_feature (2)..(2): Xaa can be Cys or D-Cys
  misc_feature (6)..(6): Xaa can be Cys or D-Cys
GXCEWXCTPACTGC

SEQ ID NO: 856 - protein, 15 aa, Artificial Sequence
  Synthetically generated peptide
  misc_feature (2)..(2): Xaa can be Cys or D-Cys
  misc_feature (6)..(6): Xaa can be Cys or D-Cys
GXCEWXCTPACTGCK

SEQ ID NO: 857 - protein, 15 aa, Artificial Sequence
  Synthetically generated peptide
  misc_feature (2)..(2): Xaa can be Cys or D-Cys
  misc_feature (6)..(6): Xaa can be Cys or D-Cys
GXCEWXCTPACTGCY

SEQ ID NO: 858 - protein, 14 aa, Artificial Sequence
  Synthetically generated peptide
  misc_feature (2)..(2): Xaa can be Cys or D-Cys
  misc_feature (6)..(6): Xaa can be Cys or D-Cys
  misc_feature (14)..(14): Xaa can be Cys or D-Cys
GXCEWXCTPACTGX

SEQ ID NO: 859 - protein, 15 aa, Artificial Sequence
  Synthetically generated peptide
  misc_feature (2)..(2): Xaa can be Cys or D-Cys
  misc_feature (6)..(6): Xaa can be Cys or D-Cys
  misc_feature (14)..(14): Xaa can be Cys or D-Cys
GXCEWXCTPACTGXK

SEQ ID NO: 860 - protein, 15 aa, Artificial Sequence
  Synthetically generated peptide
  misc_feature (2)..(2): Xaa can be Cys or D-Cys
  misc_feature (6)..(6): Xaa can be Cys or D-Cys
  misc_feature (14)..(14): Xaa can be Cys or D-Cys
GXCEWXCTPACTGXY

SEQ ID NO: 861 - protein, 14 aa, Artificial Sequence
  Synthetically generated peptide
KCCEVCCNPACTGC

SEQ ID NO: 862 - protein, 15 aa, Artificial Sequence
  Synthetically generated peptide
KCCEVCCNPACTGCK

SEQ ID NO: 863 - protein, 15 aa, Artificial Sequence
  Synthetically generated peptide
KCCEVCCNPACTGCY

SEQ ID NO: 864 - protein, 14 aa, Artificial Sequence
  Synthetically generated peptide
  misc_feature (14)..(14): Xaa can be Cys or D-Cys
KCCEVCCNPACTGX

SEQ ID NO: 865 - protein, 15 aa, Artificial Sequence
  Synthetically generated peptide
  misc_feature (14)..(14): Xaa can be Cys or D-Cys
KCCEVCCNPACTGXK

SEQ ID NO: 866 - protein, 15 aa, Artificial Sequence
  Synthetically generated peptide
  misc_feature (14)..(14): Xaa can be Cys or D-Cys
KCCEVCCNPACTGXY

SEQ ID NO: 867 - protein, 14 aa, Artificial Sequence
  Synthetically generated peptide
KCCEVCCTPACTGC

SEQ ID NO: 868 - protein, 15 aa, Artificial Sequence
  Synthetically generated peptide
KCCEVCCTPACTGCK

SEQ ID NO: 869 - protein, 15 aa, Artificial Sequence
  Synthetically generated peptide
KCCEVCCTPACTGCY

SEQ ID NO: 870 - protein, 14 aa, Artificial Sequence
  Synthetically generated peptide
  misc_feature (14)..(14): Xaa can be Cys or D-Cys
KCCEVCCTPACTGX

SEQ ID NO: 871 - protein, 15 aa, Artificial Sequence
  Synthetically generated peptide
  misc_feature (14)..(14): Xaa can be Cys or D-Cys
KCCEVCCTPACTGXK

SEQ ID NO: 872 - protein, 15 aa, Artificial Sequence
  Synthetically generated peptide
  misc_feature (14)..(14): Xaa can be Cys or D-Cys
KCCEVCCTPACTGXY

SEQ ID NO: 873 - protein, 14 aa, Artificial Sequence
  Synthetically generated peptide
  misc_feature (6)..(6): Xaa can be Cys or D-Cys
KCCEVXCNPACTGC

SEQ ID NO: 874 - protein, 15 aa, Artificial Sequence
  Synthetically generated peptide
  misc_feature (6)..(6): Xaa can be Cys or D-Cys
KCCEVXCNPACTGCK

SEQ ID NO: 875 - protein, 15 aa, Artificial Sequence
  Synthetically generated peptide
  misc_feature (6)..(6): Xaa can be Cys or D-Cys
KCCEVXCNPACTGCY

SEQ ID NO: 876 - protein, 14 aa, Artificial Sequence
  Synthetically generated peptide
  misc_feature (6)..(6): Xaa can be Cys or D-Cys
  misc_feature (14)..(14): Xaa can be Cys or D-Cys
KCCEVXCNPACTGX

SEQ ID NO: 877 - protein, 15 aa, Artificial Sequence
  Synthetically generated peptide
  misc_feature (6)..(6): Xaa can be Cys or D-Cys
  misc_feature (14)..(14): Xaa can be Cys or D-Cys
KCCEVXCNPACTGXK

SEQ ID NO: 878 - protein, 15 aa, Artificial Sequence
  Synthetically generated peptide
  misc_feature (6)..(6): Xaa can be Cys or D-Cys
  misc_feature (14)..(14): Xaa can be Cys or D-Cys
KCCEVXCNPACTGXY

SEQ ID NO: 879 - protein, 14 aa, Artificial Sequence
  Synthetically generated peptide
  misc_feature (6)..(6): Xaa can be Cys or D-Cys
KCCEVXCTPACTGC

SEQ ID NO: 880 - protein, 15 aa, Artificial Sequence
  Synthetically generated peptide
  misc_feature (6)..(6): Xaa can be Cys or D-Cys
KCCEVXCTPACTGCK

SEQ ID NO: 881 - protein, 15 aa, Artificial Sequence
  Synthetically generated peptide
  misc_feature (6)..(6): Xaa can be Cys or D-Cys
KCCEVXCTPACTGCY

SEQ ID NO: 882 - protein, 14 aa, Artificial Sequence
  Synthetically generated peptide
  misc_feature (6)..(6): Xaa can be Cys or D-Cys
  misc_feature (14)..(14): Xaa can be Cys or D-Cys
KCCEVXCTPACTGX

SEQ ID NO: 883 - protein, 15 aa, Artificial Sequence
  Synthetically generated peptide
  misc_feature (6)..(6): Xaa can be Cys or D-Cys
  misc_feature (14)..(14): Xaa can be Cys or D-Cys
KCCEVXCTPACTGXK

SEQ ID NO: 884 - protein, 15 aa, Artificial Sequence
  Synthetically generated peptide
  misc_feature (6)..(6): Xaa can be Cys or D-Cys
  misc_feature (14)..(14): Xaa can be Cys or D-Cys
KCCEVXCTPACTGXY

SEQ ID NO: 885 - protein, 14 aa, Artificial Sequence
  Synthetically generated peptide
KCCEICCNPACTGC

SEQ ID NO: 886 - protein, 15 aa, Artificial Sequence
  Synthetically generated peptide
KCCEICCNPACTGCK

SEQ ID NO: 887 - protein, 15 aa, Artificial Sequence
  Synthetically generated peptide
KCCEICCNPACTGCY

SEQ ID NO: 888 - protein, 14 aa, Artificial Sequence
  Synthetically generated peptide
  misc_feature (14)..(14): Xaa can be Cys or D-Cys
KCCEICCNPACTGX

SEQ ID NO: 889 - protein, 15 aa, Artificial Sequence
  Synthetically generated peptide
  misc_feature (14)..(14): Xaa can be Cys or D-Cys
KCCEICCNPACTGXK

SEQ ID NO: 890 - protein, 15 aa, Artificial Sequence
  Synthetically generated peptide
  misc_feature (14)..(14): Xaa can be Cys or D-Cys
KCCEICCNPACTGXY

SEQ ID NO: 891 - protein, 14 aa, Artificial Sequence
  Synthetically generated peptide
KCCEICCTPACTGC

SEQ ID NO: 892 - protein, 15 aa, Artificial Sequence
  Synthetically generated peptide
KCCEICCTPACTGCK

SEQ ID NO: 893 - protein, 15 aa, Artificial Sequence
  Synthetically generated peptide
KCCEICCTPACTGCY

SEQ ID NO: 894 - protein, 14 aa, Artificial Sequence
  Synthetically generated peptide
  misc_feature (14)..(14): Xaa can be Cys or D-Cys
KCCEICCTPACTGX

SEQ ID NO: 895 - protein, 15 aa, Artificial Sequence
  Synthetically generated peptide
  misc_feature (14)..(14): Xaa can be Cys or D-Cys
KCCEICCTPACTGXK

SEQ ID NO: 896 - protein, 15 aa, Artificial Sequence
  Synthetically generated peptide
  misc_feature (14)..(14): Xaa can be Cys or D-Cys
KCCEICCTPACTGXY

SEQ ID NO: 897 - protein, 14 aa, Artificial Sequence
  Synthetically generated peptide
  misc_feature (6)..(6): Xaa can be Cys or D-Cys
KCCEIXCNPACTGC

SEQ ID NO: 898 - protein, 15 aa, Artificial Sequence
  Synthetically generated peptide
  misc_feature (6)..(6): Xaa can be Cys or D-Cys
KCCEIXCNPACTGCK

SEQ ID NO: 899 - protein, 15 aa, Artificial Sequence
  Synthetically generated peptide
  misc_feature (6)..(6): Xaa can be Cys or D-Cys
KCCEIXCNPACTGCY

SEQ ID NO: 900 - protein, 14 aa, Artificial Sequence
  Synthetically generated peptide
  misc_feature (6)..(6): Xaa can be Cys or D-Cys
  misc_feature (14)..(14): Xaa can be Cys or D-Cys
KCCEIXCNPACTGX

SEQ ID NO: 901 - protein, 15 aa, Artificial Sequence
  Synthetically generated peptide
  misc_feature (6)..(6): Xaa can be Cys or D-Cys
  misc_feature (14)..(14): Xaa can be Cys or D-Cys
KCCEIXCNPACTGXK

SEQ ID NO: 902 - protein, 15 aa, Artificial Sequence
  Synthetically generated peptide
  misc_feature (6)..(6): Xaa can be Cys or D-Cys
  misc_feature (14)..(14): Xaa can be Cys or D-Cys
KCCEIXCNPACTGXY

SEQ ID NO: 903 - protein, 14 aa, Artificial Sequence
  Synthetically generated peptide
  misc_feature (6)..(6): Xaa can be Cys or D-Cys
KCCEIXCTPACTGC

SEQ ID NO: 904 - protein, 15 aa, Artificial Sequence
  Synthetically generated peptide
  misc_feature (6)..(6): Xaa can be Cys or D-Cys
KCCEIXCTPACTGCK

SEQ ID NO: 905 - protein, 15 aa, Artificial Sequence
  Synthetically generated peptide
  misc_feature (6)..(6): Xaa can be Cys or D-Cys
KCCEIXCTPACTGCY

SEQ ID NO: 906 - protein, 14 aa, Artificial Sequence
  Synthetically generated peptide
  misc_feature (6)..(6): Xaa can be Cys or D-Cys
  misc_feature (14)..(14): Xaa can be Cys or D-Cys
KCCEIXCTPACTGX

SEQ ID NO: 907 - protein, 15 aa, Artificial Sequence
  Synthetically generated peptide
  misc_feature (6)..(6): Xaa can be Cys or D-Cys
  misc_feature (14)..(14): Xaa can be Cys or D-Cys
KCCEIXCTPACTGXK

SEQ ID NO: 908 - protein, 15 aa, Artificial Sequence
  Synthetically generated peptide
  misc_feature (6)..(6): Xaa can be Cys or D-Cys
  misc_feature (14)..(14): Xaa can be Cys or D-Cys
KCCEIXCTPACTGXY

SEQ ID NO: 909 - protein, 14 aa, Artificial Sequence
  Synthetically generated peptide
KCCELCCNPACTGC

SEQ ID NO: 910 - protein, 15 aa, Artificial Sequence
  Synthetically generated peptide
KCCELCCNPACTGCK

SEQ ID NO: 911 - protein, 15 aa, Artificial Sequence
  Synthetically generated peptide
KCCELCCNPACTGCY

SEQ ID NO: 912 - protein, 14 aa, Artificial Sequence
  Synthetically generated peptide
  misc_feature (14)..(14): Xaa can be Cys or D-Cys
KCCELCCNPACTGX

SEQ ID NO: 913 - protein, 15 aa, Artificial Sequence
  Synthetically generated peptide
  misc_feature (14)..(14): Xaa can be Cys or D-Cys
KCCELCCNPACTGXK

SEQ ID NO: 914 - protein, 15 aa, Artificial Sequence
  Synthetically generated peptide
  misc_feature (14)..(14): Xaa can be Cys or D-Cys
KCCELCCNPACTGXY

SEQ ID NO: 915 - protein, 14 aa, Artificial Sequence
  Synthetically generated peptide
KCCELCCTPACTGC

SEQ ID NO: 916 - protein, 15 aa, Artificial Sequence
  Synthetically generated peptide
KCCELCCTPACTGCK

SEQ ID NO: 917 - protein, 15 aa, Artificial Sequence
  Synthetically generated peptide
KCCELCCTPACTGCY

SEQ ID NO: 918 - protein, 14 aa, Artificial Sequence
  Synthetically generated peptide
  misc_feature (14)..(14): Xaa can be Cys or D-Cys
KCCELCCTPACTGX

SEQ ID NO: 919 - protein, 15 aa, Artificial Sequence
  Synthetically generated peptide
  misc_feature (14)..(14): Xaa can be Cys or D-Cys
KCCELCCTPACTGXK

SEQ ID NO: 920 - protein, 15 aa, Artificial Sequence
  Synthetically generated peptide
  misc_feature (14)..(14): Xaa can be Cys or D-Cys
KCCELCCTPACTGXY

SEQ ID NO: 921 - protein, 14 aa, Artificial Sequence
  Synthetically generated peptide
  misc_feature (6)..(6): Xaa can be Cys or D-Cys
KCCELXCNPACTGC

SEQ ID NO: 922 - protein, 15 aa, Artificial Sequence
  Synthetically generated peptide
  misc_feature (6)..(6): Xaa can be Cys or D-Cys
KCCELXCNPACTGCK

SEQ ID NO: 923 - protein, 15 aa, Artificial Sequence
  Synthetically generated peptide
  misc_feature (6)..(6): Xaa can be Cys or D-Cys
KCCELXCNPACTGCY

SEQ ID NO: 924 - protein, 14 aa, Artificial Sequence
  Synthetically generated peptide
  misc_feature (6)..(6): Xaa can be Cys or D-Cys
  misc_feature (14)..(14): Xaa can be Cys or D-Cys
KCCELXCNPACTGX

SEQ ID NO: 925 - protein, 15 aa, Artificial Sequence
  Synthetically generated peptide
  misc_feature (6)..(6): Xaa can be Cys or D-Cys
  misc_feature (14)..(14): Xaa can be Cys or D-Cys
KCCELXCNPACTGXK

SEQ ID NO: 926 - protein, 15 aa, Artificial Sequence
  Synthetically generated peptide
  misc_feature (6)..(6): Xaa can be Cys or D-Cys
  misc_feature (14)..(14): Xaa can be Cys or D-Cys
KCCELXCNPACTGXY

SEQ ID NO: 927 - protein, 14 aa, Artificial Sequence
  Synthetically generated peptide
  misc_feature (6)..(6): Xaa can be Cys or D-Cys
KCCELXCTPACTGC

SEQ ID NO: 928 - protein, 15 aa, Artificial Sequence
  Synthetically generated peptide
  misc_feature (6)..(6): Xaa can be Cys or D-Cys
KCCELXCTPACTGCK

SEQ ID NO: 929 - protein, 15 aa, Artificial Sequence
  Synthetically generated peptide
  misc_feature (6)..(6): Xaa can be Cys or D-Cys
KCCELXCTPACTGCY

SEQ ID NO: 930 - protein, 14 aa, Artificial Sequence
  Synthetically generated peptide
  misc_feature (6)..(6): Xaa can be Cys or D-Cys
  misc_feature (14)..(14): Xaa can be Cys or D-Cys
KCCELXCTPACTGX

SEQ ID NO: 931 - protein, 15 aa, Artificial Sequence
  Synthetically generated peptide
  misc_feature (6)..(6): Xaa can be Cys or D-Cys
  misc_feature (14)..(14): Xaa can be Cys or D-Cys
KCCELXCTPACTGXK

SEQ ID NO: 932 - protein, 15 aa, Artificial Sequence
  Synthetically generated peptide
  misc_feature (6)..(6): Xaa can be Cys or D-Cys
  misc_feature (14)..(14): Xaa can be Cys or D-Cys
KCCELXCTPACTGXY

SEQ ID NO: 933 - protein, 14 aa, Artificial Sequence
  Synthetically generated peptide
KCCEYCCNPACTGC

SEQ ID NO: 934 - protein, 15 aa, Artificial Sequence
  Synthetically generated peptide
KCCEYCCNPACTGCK

SEQ ID NO: 935 - protein, 15 aa, Artificial Sequence
  Synthetically generated peptide
KCCEYCCNPACTGCY

SEQ ID NO: 936 - protein, 14 aa, Artificial Sequence
  Synthetically generated peptide
  misc_feature (14)..(14): Xaa can be Cys or D-Cys
KCCEYCCNPACTGX

SEQ ID NO: 937 - protein, 15 aa, Artificial Sequence
  Synthetically generated peptide
  misc_feature (14)..(14): Xaa can be Cys or D-Cys
KCCEYCCNPACTGXK

SEQ ID NO: 938 - protein, 15 aa, Artificial Sequence
  Synthetically generated peptide
  misc_feature (14)..(14): Xaa can be Cys or D-Cys
KCCEYCCNPACTGXY

SEQ ID NO: 939 - protein, 14 aa, Artificial Sequence
  Synthetically generated peptide
KCCEYCCTPACTGC

SEQ ID NO: 940 - protein, 15 aa, Artificial Sequence
  Synthetically generated peptide
KCCEYCCTPACTGCK

SEQ ID NO: 941 - protein, 15 aa, Artificial Sequence
  Synthetically generated peptide
KCCEYCCTPACTGCY

SEQ ID NO: 942 - protein, 14 aa, Artificial Sequence
  Synthetically generated peptide
  misc_feature (14)..(14): Xaa can be Cys or D-Cys
KCCEYCCTPACTGX

SEQ ID NO: 943 - protein, 15 aa, Artificial Sequence
  Synthetically generated peptide
  misc_feature (14)..(14): Xaa can be Cys or D-Cys
KCCEYCCTPACTGXK

SEQ ID NO: 944 - protein, 15 aa, Artificial Sequence
  Synthetically generated peptide
  misc_feature (14)..(14): Xaa can be Cys or D-Cys
KCCEYCCTPACTGXY

SEQ ID NO: 945 - protein, 14 aa, Artificial Sequence
  Synthetically generated peptide
  misc_feature (6)..(6): Xaa can be Cys or D-Cys
KCCEYXCNPACTGC

SEQ ID NO: 946 - protein, 15 aa, Artificial Sequence
  Synthetically generated peptide
  misc_feature (6)..(6): Xaa can be Cys or D-Cys
KCCEYXCNPACTGCK

SEQ ID NO: 947 - protein, 15 aa, Artificial Sequence
  Synthetically generated peptide
  misc_feature (6)..(6): Xaa can be Cys or D-Cys
KCCEYXCNPACTGCY

SEQ ID NO: 948 - protein, 14 aa, Artificial Sequence
  Synthetically generated peptide
  misc_feature (6)..(6): Xaa can be Cys or D-Cys
  misc_feature (14)..(14): Xaa can be Cys or D-Cys
KCCEYXCNPACTGX

SEQ ID NO: 949 - protein, 15 aa, Artificial Sequence
  Synthetically generated peptide
  misc_feature (6)..(6): Xaa can be Cys or D-Cys
  misc_feature (14)..(14): Xaa can be Cys or D-Cys
KCCEYXCNPACTGXK

SEQ ID NO: 950 - protein, 15 aa, Artificial Sequence
  Synthetically generated peptide
  misc_feature (6)..(6): Xaa can be Cys or D-Cys
  misc_feature (14)..(14): Xaa can be Cys or D-Cys
KCCEYXCNPACTGXY

SEQ ID NO: 951 - protein, 14 aa, Artificial Sequence
  Synthetically generated peptide
  misc_feature (6)..(6): Xaa can be Cys or D-Cys
KCCEYXCTPACTGC

SEQ ID NO: 952 - protein, 15 aa, Artificial Sequence
  Synthetically generated peptide
  misc_feature (6)..(6): Xaa can be Cys or D-Cys
KCCEYXCTPACTGCK

SEQ ID NO: 953 - protein, 15 aa, Artificial Sequence
  Synthetically generated peptide
  misc_feature (6)..(6): Xaa can be Cys or D-Cys
KCCEYXCTPACTGCY

SEQ ID NO: 954 - protein, 14 aa, Artificial Sequence
  Synthetically generated peptide
  misc_feature (6)..(6): Xaa can be Cys or D-Cys
  misc_feature (14)..(14): Xaa can be Cys or D-Cys
KCCEYXCTPACTGX

SEQ ID NO: 955 - protein, 15 aa, Artificial Sequence
  Synthetically generated peptide
  misc_feature (6)..(6): Xaa can be Cys or D-Cys
  misc_feature (14)..(14): Xaa can be Cys or D-Cys
KCCEYXCTPACTGXK

SEQ ID NO: 956 - protein, 15 aa, Artificial Sequence
  Synthetically generated peptide
  misc_feature (6)..(6): Xaa can be Cys or D-Cys
  misc_feature (14)..(14): Xaa can be Cys or D-Cys
KCCEYXCTPACTGXY

SEQ ID NO: 957 - protein, 14 aa, Artificial Sequence
  Synthetically generated peptide
KCCEFCCNPACTGC

SEQ ID NO: 958 - protein, 15 aa, Artificial Sequence
  Synthetically generated peptide
KCCEFCCNPACTGCK

SEQ ID NO: 959 - protein, 15 aa, Artificial Sequence
  Synthetically generated peptide
KCCEFCCNPACTGCY

SEQ ID NO: 960 - protein, 14 aa, Artificial Sequence
  Synthetically generated peptide
  misc_feature (14)..(14): Xaa can be Cys or D-Cys
KCCEFCCNPACTGX

SEQ ID NO: 961 - protein, 15 aa, Artificial Sequence
  Synthetically generated peptide
  misc_feature (14)..(14): Xaa can be Cys or D-Cys
KCCEFCCNPACTGXK

SEQ ID NO: 962 - protein, 15 aa, Artificial Sequence
  Synthetically generated peptide
  misc_feature (14)..(14): Xaa can be Cys or D-Cys
KCCEFCCNPACTGXY

SEQ ID NO: 963 - protein, 14 aa, Artificial Sequence
  Synthetically generated peptide
KCCEFCCTPACTGC

SEQ ID NO: 964 - protein, 15 aa, Artificial Sequence
  Synthetically generated peptide
KCCEFCCTPACTGCK

SEQ ID NO: 965 - protein, 15 aa, Artificial Sequence
  Synthetically generated peptide
KCCEFCCTPACTGCY

SEQ ID NO: 966 - protein, 14 aa, Artificial Sequence
  Synthetically generated peptide
  misc_feature (14)..(14): Xaa can be Cys or D-Cys
KCCEFCCTPACTGX

SEQ ID NO: 967 - protein, 15 aa, Artificial Sequence
  Synthetically generated peptide
  misc_feature (14)..(14): Xaa can be Cys or D-Cys
KCCEFCCTPACTGXK

SEQ ID NO: 968 - protein, 15 aa, Artificial Sequence
  Synthetically generated peptide
  misc_feature (14)..(14): Xaa can be Cys or D-Cys
KCCEFCCTPACTGXY

SEQ ID NO: 969 - protein, 14 aa, Artificial Sequence
  Synthetically generated peptide
  misc_feature (6)..(6): Xaa can be Cys or D-Cys
KCCEFXCNPACTGC

SEQ ID NO: 970 - protein, 15 aa, Artificial Sequence
  Synthetically generated peptide
  misc_feature (6)..(6): Xaa can be Cys or D-Cys
KCCEFXCNPACTGCK

SEQ ID NO: 971 - protein, 15 aa, Artificial Sequence
  Synthetically generated peptide
  misc_feature (6)..(6): Xaa can be Cys or D-Cys
KCCEFXCNPACTGCY

SEQ ID NO: 972 - protein, 14 aa, Artificial Sequence
  Synthetically generated peptide
  misc_feature (6)..(6): Xaa can be Cys or D-Cys
  misc_feature (14)..(14): Xaa can be Cys or D-Cys
KCCEFXCNPACTGX

SEQ ID NO: 973 - protein, 15 aa, Artificial Sequence
  Synthetically generated peptide
  misc_feature (6)..(6): Xaa can be Cys or D-Cys
  misc_feature (14)..(14): Xaa can be Cys or D-Cys
KCCEFXCNPACTGXK

SEQ ID NO: 974 - protein, 15 aa, Artificial Sequence
  Synthetically generated peptide
  misc_feature (6)..(6): Xaa can be Cys or D-Cys
  misc_feature (14)..(14): Xaa can be Cys or D-Cys
KCCEFXCNPACTGXY

SEQ ID NO: 975 - protein, 14 aa, Artificial Sequence
  Synthetically generated peptide
  misc_feature (6)..(6): Xaa can be Cys or D-Cys
KCCEFXCTPACTGC

SEQ ID NO: 976 - protein, 15 aa, Artificial Sequence
  Synthetically generated peptide
  misc_feature (6)..(6): Xaa can be Cys or D-Cys
KCCEFXCTPACTGCK

SEQ ID NO: 977 - protein, 15 aa, Artificial Sequence
  Synthetically generated peptide
  misc_feature (6)..(6): Xaa can be Cys or D-Cys
KCCEFXCTPACTGCY

SEQ ID NO: 978 - protein, 14 aa, Artificial Sequence
  Synthetically generated peptide
  misc_feature (6)..(6): Xaa can be Cys or D-Cys
  misc_feature (14)..(14): Xaa can be Cys or D-Cys
KCCEFXCTPACTGX

SEQ ID NO: 979 - protein, 15 aa, Artificial Sequence
  Synthetically generated peptide
  misc_feature (6)..(6): Xaa can be Cys or D-Cys
  misc_feature (14)..(14): Xaa can be Cys or D-Cys
KCCEFXCTPACTGXK

SEQ ID NO: 980 - protein, 15 aa, Artificial Sequence
  Synthetically generated peptide
  misc_feature (6)..(6): Xaa can be Cys or D-Cys
  misc_feature (14)..(14): Xaa can be Cys or D-Cys
KCCEFXCTPACTGXY

SEQ ID NO: 981 - protein, 14 aa, Artificial Sequence
  Synthetically generated peptide
KCCEWCCNPACTGC

SEQ ID NO: 982 - protein, 15 aa, Artificial Sequence
  Synthetically generated peptide
KCCEWCCNPACTGCK

SEQ ID NO: 983 - protein, 15 aa, Artificial Sequence
  Synthetically generated peptide
KCCEWCCNPACTGCY

SEQ ID NO: 984 - protein, 14 aa, Artificial Sequence
  Synthetically generated peptide
  misc_feature (14)..(14): Xaa can be Cys or D-Cys
KCCEWCCNPACTGX

SEQ ID NO: 985 - protein, 15 aa, Artificial Sequence
  Synthetically generated peptide
  misc_feature (14)..(14): Xaa can be Cys or D-Cys
KCCEWCCNPACTGXK

SEQ ID NO: 986 - protein, 15 aa, Artificial Sequence
  Synthetically generated peptide
  misc_feature (14)..(14): Xaa can be Cys or D-Cys
KCCEWCCNPACTGXY

SEQ ID NO: 987 - protein, 14 aa, Artificial Sequence
  Synthetically generated peptide
KCCEWCCTPACTGC

SEQ ID NO: 988 - protein, 15 aa, Artificial Sequence
  Synthetically generated peptide
KCCEWCCTPACTGCK

SEQ ID NO: 989 - protein, 15 aa, Artificial Sequence
  Synthetically generated peptide
KCCEWCCTPACTGCY

SEQ ID NO: 990 - protein, 14 aa, Artificial Sequence
  Synthetically generated peptide
  misc_feature (14)..(14): Xaa can be Cys or D-Cys
KCCEWCCTPACTGX

SEQ ID NO: 991 - protein, 15 aa, Artificial Sequence
  Synthetically generated peptide
  misc_feature (14)..(14): Xaa can be Cys or D-Cys
KCCEWCCTPACTGXK

SEQ ID NO: 992 - protein, 15 aa, Artificial Sequence
  Synthetically generated peptide
  misc_feature (14)..(14): Xaa can be Cys or D-Cys
KCCEWCCTPACTGXY

SEQ ID NO: 993 - protein, 14 aa, Artificial Sequence
  Synthetically generated peptide
  misc_feature (6)..(6): Xaa can be Cys or D-Cys
KCCEWXCNPACTGC

SEQ ID NO: 994 - protein, 15 aa, Artificial Sequence
  Synthetically generated peptide
  misc_feature (6)..(6): Xaa can be Cys or D-Cys
KCCEWXCNPACTGCK

SEQ ID NO: 995 - protein, 15 aa, Artificial Sequence
  Synthetically generated peptide
  misc_feature (6)..(6): Xaa can be Cys or D-Cys
KCCEWXCNPACTGCY

SEQ ID NO: 996 - protein, 14 aa, Artificial Sequence
  Synthetically generated peptide
  misc_feature (6)..(6): Xaa can be Cys or D-Cys
  misc_feature (14)..(14): Xaa can be Cys or D-Cys
KCCEWXCNPACTGX

SEQ ID NO: 997 - protein, 15 aa, Artificial Sequence
  Synthetically generated peptide
  misc_feature (6)..(6): Xaa can be Cys or D-Cys
  misc_feature (14)..(14): Xaa can be Cys or D-Cys
KCCEWXCNPACTGXK

SEQ ID NO: 998 - protein, 15 aa, Artificial Sequence
  Synthetically generated peptide
  misc_feature (6)..(6): Xaa can be Cys or D-Cys
  misc_feature (14)..(14): Xaa can be Cys or D-Cys
KCCEWXCNPACTGXY

SEQ ID NO: 999 - protein, 14 aa, Artificial Sequence
  Synthetically generated peptide
  misc_feature (6)..(6): Xaa can be Cys or D-Cys
KCCEWXCTPACTGC

SEQ ID NO: 1000 - protein, 15 aa, Artificial Sequence
  Synthetically generated peptide
  misc_feature (6)..(6): Xaa can be Cys or D-Cys
KCCEWXCTPACTGCK

SEQ ID NO: 1001 - protein, 15 aa, Artificial Sequence
  Synthetically generated peptide
  misc_feature (6)..(6): Xaa can be Cys or D-Cys
KCCEWXCTPACTGCY

SEQ ID NO: 1002 - protein, 14 aa, Artificial Sequence
  Synthetically generated peptide
  misc_feature (6)..(6): Xaa can be Cys or D-Cys
  misc_feature (14)..(14): Xaa can be Cys or D-Cys
KCCEWXCTPACTGX

SEQ ID NO: 1003 - protein, 15 aa, Artificial Sequence
  Synthetically generated peptide
  misc_feature (6)..(6): Xaa can be Cys or D-Cys
  misc_feature (14)..(14): Xaa can be Cys or D-Cys
KCCEWXCTPACTGXK

SEQ ID NO: 1004 - protein, 15 aa, Artificial Sequence
  Synthetically generated peptide
  misc_feature (6)..(6): Xaa can be Cys or D-Cys
  misc_feature (14)..(14): Xaa can be Cys or D-Cys
KCCEWXCTPACTGXY

SEQ ID NO: 1005 - protein, 14 aa, Artificial Sequence
  Synthetically generated peptide
  misc_feature (2)..(2): Xaa can be Cys or D-Cys
KXCEVCCNPACTGC

SEQ ID NO: 1006 - protein, 15 aa, Artificial Sequence
  Synthetically generated peptide
  misc_feature (2)..(2): Xaa can be Cys or D-Cys
KXCEVCCNPACTGCK

SEQ ID NO: 1007 - protein, 15 aa, Artificial Sequence
  Synthetically generated peptide
  misc_feature (2)..(2): Xaa can be Cys or D-Cys
KXCEVCCNPACTGCY

SEQ ID NO: 1008 - protein, 14 aa, Artificial Sequence
  Synthetically generated peptide
  misc_feature (2)..(2): Xaa can be Cys or D-Cys
  misc_feature (14)..(14): Xaa can be Cys or D-Cys
KXCEVCCNPACTGX

SEQ ID NO: 1009 - protein, 15 aa, Artificial Sequence
  Synthetically generated peptide
  misc_feature (2)..(2): Xaa can be Cys or D-Cys
  misc_feature (14)..(14): Xaa can be Cys or D-Cys
KXCEVCCNPACTGXK

SEQ ID NO: 1010 - protein, 15 aa, Artificial Sequence
  Synthetically generated peptide
  misc_feature (2)..(2): Xaa can be Cys or D-Cys
  misc_feature (14)..(14): Xaa can be Cys or D-Cys
KXCEVCCNPACTGXY

SEQ ID NO: 1011 - protein, 14 aa, Artificial Sequence
  Synthetically generated peptide
  misc_feature (2)..(2): Xaa can be Cys or D-Cys
KXCEVCCTPACTGC

SEQ ID NO: 1012 - protein, 15 aa, Artificial Sequence
  Synthetically generated peptide
  misc_feature (2)..(2): Xaa can be Cys or D-Cys
KXCEVCCTPACTGCK

SEQ ID NO: 1013 - protein, 15 aa, Artificial Sequence
  Synthetically generated peptide
  misc_feature (2)..(2): Xaa can be Cys or D-Cys
KXCEVCCTPACTGCY

SEQ ID NO: 1014 - protein, 14 aa, Artificial Sequence
  Synthetically generated peptide
  misc_feature (2)..(2): Xaa can be Cys or D-Cys
  misc_feature (14)..(14): Xaa can be Cys or D-Cys
KXCEVCCTPACTGX

SEQ ID NO: 1015 - protein, 15 aa, Artificial Sequence
  Synthetically generated peptide
  misc_feature (2)..(2): Xaa can be Cys or D-Cys
  misc_feature (14)..(14): Xaa can be Cys or D-Cys
KXCEVCCTPACTGXK

SEQ ID NO: 1016 - protein, 15 aa, Artificial Sequence
  Synthetically generated peptide
  misc_feature (2)..(2): Xaa can be Cys or D-Cys
  misc_feature (14)..(14): Xaa can be Cys or D-Cys
KXCEVCCTPACTGXY

SEQ ID NO: 1017 - protein, 14 aa, Artificial Sequence
  Synthetically generated peptide
  misc_feature (2)..(2): Xaa can be Cys or D-Cys
  misc_feature (6)..(6): Xaa can be Cys or D-Cys
KXCEVXCNPACTGC

SEQ ID NO: 1018 - protein, 15 aa, Artificial Sequence
  Synthetically generated peptide
  misc_feature (2)..(2): Xaa can be Cys or D-Cys
  misc_feature (6)..(6): Xaa can be Cys or D-Cys
KXCEVXCNPACTGCK

SEQ ID NO: 1019 - protein, 15 aa, Artificial Sequence
  Synthetically generated peptide
  misc_feature (2)..(2): Xaa can be Cys or D-Cys
  misc_feature (6)..(6): Xaa can be Cys or D-Cys
KXCEVXCNPACTGCY

SEQ ID NO: 1020 - protein, 14 aa, Artificial Sequence
  Synthetically generated peptide
  misc_feature (2)..(2): Xaa can be Cys or D-Cys
  misc_feature (6)..(6): Xaa can be Cys or D-Cys
  misc_feature (14)..(14): Xaa can be Cys or D-Cys
KXCEVXCNPACTGX

SEQ ID NO: 1021 - protein, 15 aa, Artificial Sequence
  Synthetically generated peptide
  misc_feature (2)..(2): Xaa can be Cys or D-Cys
  misc_feature (6)..(6): Xaa can be Cys or D-Cys
  misc_feature (14)..(14): Xaa can be Cys or D-Cys
KXCEVXCNPACTGXK

SEQ ID NO: 1022 - protein, 15 aa, Artificial Sequence
  Synthetically generated peptide
  misc_feature (2)..(2): Xaa can be Cys or D-Cys
  misc_feature (6)..(6): Xaa can be Cys or D-Cys
  misc_feature (14)..(14): Xaa can be Cys or D-Cys
KXCEVXCNPACTGXY

SEQ ID NO: 1023 - protein, 14 aa, Artificial Sequence
  Synthetically generated peptide
  misc_feature (2)..(2): Xaa can be Cys or D-Cys
  misc_feature (6)..(6): Xaa can be Cys or D-Cys
KXCEVXCTPACTGC

SEQ ID NO: 1024 - protein, 15 aa, Artificial Sequence
  Synthetically generated peptide
  misc_feature (2)..(2): Xaa can be Cys or D-Cys
  misc_feature (6)..(6): Xaa can be Cys or D-Cys
KXCEVXCTPACTGCK

SEQ ID NO: 1025 - protein, 15 aa, Artificial Sequence
  Synthetically generated peptide
  misc_feature (2)..(2): Xaa can be Cys or D-Cys
  misc_feature (6)..(6): Xaa can be Cys or D-Cys
KXCEVXCTPACTGCY

SEQ ID NO: 1026 - protein, 14 aa, Artificial Sequence
  Synthetically generated peptide
  misc_feature (2)..(2): Xaa can be Cys or D-Cys
  misc_feature (6)..(6): Xaa can be Cys or D-Cys
  misc_feature (14)..(14): Xaa can be Cys or D-Cys
KXCEVXCTPACTGX

SEQ ID NO: 1027 - protein, 15 aa, Artificial Sequence
  Synthetically generated peptide
  misc_feature (2)..(2): Xaa can be Cys or D-Cys
  misc_feature (6)..(6): Xaa can be Cys or D-Cys
  misc_feature (14)..(14): Xaa can be Cys or D-Cys
KXCEVXCTPACTGXK

SEQ ID NO: 1028 - protein, 15 aa, Artificial Sequence
  Synthetically generated peptide
  misc_feature (2)..(2): Xaa can be Cys or D-Cys
  misc_feature (6)..(6): Xaa can be Cys or D-Cys
  misc_feature (14)..(14): Xaa can be Cys or D-Cys
KXCEVXCTPACTGXY

SEQ ID NO: 1029 - protein, 14 aa, Artificial Sequence
  Synthetically generated peptide
  misc_feature (2)..(2): Xaa can be Cys or D-Cys
KXCEICCNPACTGC

SEQ ID NO: 1030 - protein, 15 aa, Artificial Sequence
  Synthetically generated peptide
  misc_feature (2)..(2): Xaa can be Cys or D-Cys
KXCEICCNPACTGCK

SEQ ID NO: 1031 - protein, 15 aa, Artificial Sequence
  Synthetically generated peptide
  misc_feature (2)..(2): Xaa can be Cys or D-Cys
KXCEICCNPACTGCY

SEQ ID NO: 1032 - protein, 14 aa, Artificial Sequence
  Synthetically generated peptide
  misc_feature (2)..(2): Xaa can be Cys or D-Cys
  misc_feature (14)..(14): Xaa can be Cys or D-Cys
KXCEICCNPACTGX

SEQ ID NO: 1033 - protein, 15 aa, Artificial Sequence
  Synthetically generated peptide
  misc_feature (2)..(2): Xaa can be Cys or D-Cys
  misc_feature (14)..(14): Xaa can be Cys or D-Cys
KXCEICCNPACTGXK

SEQ ID NO: 1034 - protein, 15 aa, Artificial Sequence
  Synthetically generated peptide
  misc_feature (2)..(2): Xaa can be Cys or D-Cys
  misc_feature (14)..(14): Xaa can be Cys or D-Cys
KXCEICCNPACTGXY

SEQ ID NO: 1035 - protein, 14 aa, Artificial Sequence
  Synthetically generated peptide
  misc_feature (2)..(2): Xaa can be Cys or D-Cys
KXCEICCTPACTGC

SEQ ID NO: 1036 - protein, 15 aa, Artificial Sequence
  Synthetically generated peptide
  misc_feature (2)..(2): Xaa can be Cys or D-Cys
KXCEICCTPACTGCK

SEQ ID NO: 1037 - protein, 15 aa, Artificial Sequence
  Synthetically generated peptide
  misc_feature (2)..(2): Xaa can be Cys or D-Cys
KXCEICCTPACTGCY

SEQ ID NO: 1038 - protein, 14 aa, Artificial Sequence
  Synthetically generated peptide
  misc_feature (2)..(2): Xaa can be Cys or D-Cys
  misc_feature (14)..(14): Xaa can be Cys or D-Cys
KXCEICCTPACTGX

SEQ ID NO: 1039 - protein, 15 aa, Artificial Sequence
  Synthetically generated peptide
  misc_feature (2)..(2): Xaa can be Cys or D-Cys
  misc_feature (14)..(14): Xaa can be Cys or D-Cys
KXCEICCTPACTGXK

SEQ ID NO: 1040 - protein, 15 aa, Artificial Sequence
  Synthetically generated peptide
  misc_feature (2)..(2): Xaa can be Cys or D-Cys
  misc_feature (14)..(14): Xaa can be Cys or D-Cys
KXCEICCTPACTGXY

SEQ ID NO: 1041 - protein, 14 aa, Artificial Sequence
  Synthetically generated peptide
  misc_feature (2)..(2): Xaa can be Cys or D-Cys
  misc_feature (6)..(6): Xaa can be Cys or D-Cys
KXCEIXCNPACTGC

SEQ ID NO: 1042 - protein, 15 aa, Artificial Sequence
  Synthetically generated peptide
  misc_feature (2)..(2): Xaa can be Cys or D-Cys
  misc_feature (6)..(6): Xaa can be Cys or D-Cys
KXCEIXCNPACTGCK

SEQ ID NO: 1043 - protein, 15 aa, Artificial Sequence
  Synthetically generated peptide
  misc_feature (2)..(2): Xaa can be Cys or D-Cys
  misc_feature (6)..(6): Xaa can be Cys or D-Cys
KXCEIXCNPACTGCY

SEQ ID NO: 1044 - protein, 14 aa, Artificial Sequence
  Synthetically generated peptide
  misc_feature (2)..(2): Xaa can be Cys or D-Cys
  misc_feature (6)..(6): Xaa can be Cys or D-Cys
  misc_feature (14)..(14): Xaa can be Cys or D-Cys
KXCEIXCNPACTGX

SEQ ID NO: 1045 - protein, 15 aa, Artificial Sequence
  Synthetically generated peptide
  misc_feature (2)..(2): Xaa can be Cys or D-Cys
  misc_feature (6)..(6): Xaa can be Cys or D-Cys
  misc_feature (14)..(14): Xaa can be Cys or D-Cys
KXCEIXCNPACTGXK

SEQ ID NO: 1046 - protein, 15 aa, Artificial Sequence
  Synthetically generated peptide
  misc_feature (2)..(2): Xaa can be Cys or D-Cys
  misc_feature (6)..(6): Xaa can be Cys or D-Cys
  misc_feature (14)..(14): Xaa can be Cys or D-Cys
KXCEIXCNPACTGXY

SEQ ID NO: 1047 - protein, 14 aa, Artificial Sequence
  Synthetically generated peptide
  misc_feature (2)..(2): Xaa can be Cys or D-Cys
  misc_feature (6)..(6): Xaa can be Cys or D-Cys
KXCEIXCTPACTGC

SEQ ID NO: 1048 - protein, 15 aa, Artificial Sequence
  Synthetically generated peptide
  misc_feature (2)..(2): Xaa can be Cys or D-Cys
  misc_feature (6)..(6): Xaa can be Cys or D-Cys
KXCEIXCTPACTGCK

SEQ ID NO: 1049 - protein, 15 aa, Artificial Sequence
  Synthetically generated peptide
  misc_feature (2)..(2): Xaa can be Cys or D-Cys
  misc_feature (6)..(6): Xaa can be Cys or D-Cys
KXCEIXCTPACTGCY

SEQ ID NO: 1050 - protein, 14 aa, Artificial Sequence
  Synthetically generated peptide
  misc_feature (2)..(2): Xaa can be Cys or D-Cys
  misc_feature (6)..(6): Xaa can be Cys or D-Cys
  misc_feature (14)..(14): Xaa can be Cys or D-Cys
KXCEIXCTPACTGX

SEQ ID NO: 1051 - protein, 15 aa, Artificial Sequence
  Synthetically generated peptide
  misc_feature (2)..(2): Xaa can be Cys or D-Cys
  misc_feature (6)..(6): Xaa can be Cys or D-Cys
  misc_feature (14)..(14): Xaa can be Cys or D-Cys
KXCEIXCTPACTGXK

SEQ ID NO: 1052 - protein, 15 aa, Artificial Sequence
  Synthetically generated peptide
  misc_feature (2)..(2): Xaa can be Cys or D-Cys
  misc_feature (6)..(6): Xaa can be Cys or D-Cys
  misc_feature (14)..(14): Xaa can be Cys or D-Cys
KXCEIXCTPACTGXY

SEQ ID NO: 1053 - protein, 14 aa, Artificial Sequence
  Synthetically generated peptide
  misc_feature (2)..(2): Xaa can be Cys or D-Cys
KXCELCCNPACTGC

SEQ ID NO: 1054 - protein, 15 aa, Artificial Sequence
  Synthetically generated peptide
  misc_feature (2)..(2): Xaa can be Cys or D-Cys
KXCELCCNPACTGCK

SEQ ID NO: 1055 - protein, 15 aa, Artificial Sequence
  Synthetically generated peptide
  misc_feature (2)..(2): Xaa can be Cys or D-Cys
KXCELCCNPACTGCY

SEQ ID NO: 1056 - protein, 14 aa, Artificial Sequence
  Synthetically generated peptide
  misc_feature (2)..(2): Xaa can be Cys or D-Cys
  misc_feature (14)..(14): Xaa can be Cys or D-Cys
KXCELCCNPACTGX

SEQ ID NO: 1057 - protein, 15 aa, Artificial Sequence
  Synthetically generated peptide
  misc_feature (2)..(2): Xaa can be Cys or D-Cys
  misc_feature (14)..(14): Xaa can be Cys or D-Cys
KXCELCCNPACTGXK

SEQ ID NO: 1058 - protein, 15 aa, Artificial Sequence
  Synthetically generated peptide
  misc_feature (2)..(2): Xaa can be Cys or D-Cys
  misc_feature (14)..(14): Xaa can be Cys or D-Cys
KXCELCCNPACTGXY

SEQ ID NO: 1059 - protein, 14 aa, Artificial Sequence
  Synthetically generated peptide
  misc_feature (2)..(2): Xaa can be Cys or D-Cys
KXCELCCTPACTGC

SEQ ID NO: 1060 - protein, 15 aa, Artificial Sequence
  Synthetically generated peptide
  misc_feature (2)..(2): Xaa can be Cys or D-Cys
KXCELCCTPACTGCK

SEQ ID NO: 1061 - protein, 15 aa, Artificial Sequence
  Synthetically generated peptide
  misc_feature (2)..(2): Xaa can be Cys or D-Cys
KXCELCCTPACTGCY

SEQ ID NO: 1062 - protein, 14 aa, Artificial Sequence
  Synthetically generated peptide
  misc_feature (2)..(2): Xaa can be Cys or D-Cys
  misc_feature (14)..(14): Xaa can be Cys or D-Cys
KXCELCCTPACTGX

SEQ ID NO: 1063 - protein, 15 aa, Artificial Sequence
  Synthetically generated peptide
  misc_feature (2)..(2): Xaa can be Cys or D-Cys
  misc_feature (14)..(14): Xaa can be Cys or D-Cys
KXCELCCTPACTGXK

SEQ ID NO: 1064 - protein, 15 aa, Artificial Sequence
  Synthetically generated peptide
  misc_feature (2)..(2): Xaa can be Cys or D-Cys
  misc_feature (14)..(14): Xaa can be Cys or D-Cys
KXCELCCTPACTGXY

SEQ ID NO: 1065 - protein, 14 aa, Artificial Sequence
  Synthetically generated peptide
  misc_feature (2)..(2): Xaa can be Cys or D-Cys
  misc_feature (6)..(6): Xaa can be Cys or D-Cys
KXCELXCNPACTGC

SEQ ID NO: 1066 - protein, 15 aa, Artificial Sequence
  Synthetically generated peptide
  misc_feature (2)..(2): Xaa can be Cys or D-Cys
  misc_feature (6)..(6): Xaa can be Cys or D-Cys
KXCELXCNPACTGCK

SEQ ID NO: 1067 - protein, 15 aa, Artificial Sequence
  Synthetically generated peptide
  misc_feature (2)..(2): Xaa can be Cys or D-Cys
  misc_feature (6)..(6): Xaa can be Cys or D-Cys
KXCELXCNPACTGCY

SEQ ID NO: 1068 - protein, 14 aa, Artificial Sequence
  Synthetically generated peptide
  misc_feature (2)..(2): Xaa can be Cys or D-Cys
  misc_feature (6)..(6): Xaa can be Cys or D-Cys
  misc_feature (14)..(14): Xaa can be Cys or D-Cys
KXCELXCNPACTGX

SEQ ID NO: 1069 - protein, 15 aa, Artificial Sequence
  Synthetically generated peptide
  misc_feature (2)..(2): Xaa can be Cys or D-Cys
  misc_feature (6)..(6): Xaa can be Cys or D-Cys
  misc_feature (14)..(14): Xaa can be Cys or D-Cys
KXCELXCNPACTGXK

SEQ ID NO: 1070 - protein, 15 aa, Artificial Sequence
  Synthetically generated peptide
  misc_feature (2)..(2): Xaa can be Cys or D-Cys
  misc_feature (6)..(6): Xaa can be Cys or D-Cys
  misc_feature (14)..(14): Xaa can be Cys or D-Cys
KXCELXCNPACTGXY

SEQ ID NO: 1071 - protein, 14 aa, Artificial Sequence
  Synthetically generated peptide
  misc_feature (2)..(2): Xaa can be Cys or D-Cys
  misc_feature (6)..(6): Xaa can be Cys or D-Cys
KXCELXCTPACTGC

SEQ ID NO: 1072 - protein, 15 aa, Artificial Sequence
  Synthetically generated peptide
  misc_feature (2)..(2): Xaa can be Cys or D-Cys
  misc_feature (6)..(6): Xaa can be Cys or D-Cys
KXCELXCTPACTGCK

SEQ ID NO: 1073 - protein, 15 aa, Artificial Sequence
  Synthetically generated peptide
  misc_feature (2)..(2): Xaa can be Cys or D-Cys
  misc_feature (6)..(6): Xaa can be Cys or D-Cys
KXCELXCTPACTGCY

SEQ ID NO: 1074 - protein, 14 aa, Artificial Sequence
  Synthetically generated peptide
  misc_feature (2)..(2): Xaa can be Cys or D-Cys
  misc_feature (6)..(6): Xaa can be Cys or D-Cys
  misc_feature (14)..(14): Xaa can be Cys or D-Cys
KXCELXCTPACTGX

SEQ ID NO: 1075 - protein, 15 aa, Artificial Sequence
  Synthetically generated peptide
  misc_feature (2)..(2): Xaa can be Cys or D-Cys
  misc_feature (6)..(6): Xaa can be Cys or D-Cys
  misc_feature (14)..(14): Xaa can be Cys or D-Cys
KXCELXCTPACTGXK

SEQ ID NO: 1076 - protein, 15 aa, Artificial Sequence
  Synthetically generated peptide
  misc_feature (2)..(2): Xaa can be Cys or D-Cys
  misc_feature (6)..(6): Xaa can be Cys or D-Cys
  misc_feature (14)..(14): Xaa can be Cys or D-Cys
KXCELXCTPACTGXY

SEQ ID NO: 1077 - protein, 14 aa, Artificial Sequence
  Synthetically generated peptide
  misc_feature (2)..(2): Xaa can be Cys or D-Cys
KXCEYCCNPACTGC

SEQ ID NO: 1078 - protein, 15 aa, Artificial Sequence
  Synthetically generated peptide
  misc_feature (2)..(2): Xaa can be Cys or D-Cys
KXCEYCCNPACTGCK

SEQ ID NO: 1079 - protein, 15 aa, Artificial Sequence
  Synthetically generated peptide
  misc_feature (2)..(2): Xaa can be Cys or D-Cys
KXCEYCCNPACTGCY

SEQ ID NO: 1080 - protein, 14 aa, Artificial Sequence
  Synthetically generated peptide
  misc_feature (2)..(2): Xaa can be Cys or D-Cys
  misc_feature (14)..(14): Xaa can be Cys or D-Cys
KXCEYCCNPACTGX

SEQ ID NO: 1081 - protein, 15 aa, Artificial Sequence
  Synthetically generated peptide
  misc_feature (2)..(2): Xaa can be Cys or D-Cys
  misc_feature (14)..(14): Xaa can be Cys or D-Cys
KXCEYCCNPACTGXK

SEQ ID NO: 1082 - protein, 15 aa, Artificial Sequence
  Synthetically generated peptide
  misc_feature (2)..(2): Xaa can be Cys or D-Cys
  misc_feature (14)..(14): Xaa can be Cys or D-Cys
KXCEYCCNPACTGXY

SEQ ID NO: 1083 - protein, 14 aa, Artificial Sequence
  Synthetically generated peptide
  misc_feature (2)..(2): Xaa can be Cys or D-Cys
KXCEYCCTPACTGC

SEQ ID NO: 1084 - protein, 15 aa, Artificial Sequence
  Synthetically generated peptide
  misc_feature (2)..(2): Xaa can be Cys or D-Cys
KXCEYCCTPACTGCK

SEQ ID NO: 1085 - protein, 15 aa, Artificial Sequence
  Synthetically generated peptide
  misc_feature (2)..(2): Xaa can be Cys or D-Cys
KXCEYCCTPACTGCY

SEQ ID NO: 1086 - protein, 14 aa, Artificial Sequence
  Synthetically generated peptide
  misc_feature (2)..(2): Xaa can be Cys or D-Cys
  misc_feature (14)..(14): Xaa can be Cys or D-Cys
KXCEYCCTPACTGX

SEQ ID NO: 1087 - protein, 15 aa, Artificial Sequence
  Synthetically generated peptide
  misc_feature (2)..(2): Xaa can be Cys or D-Cys
  misc_feature (14)..(14): Xaa can be Cys or D-Cys
KXCEYCCTPACTGXK

SEQ ID NO: 1088 - protein, 15 aa, Artificial Sequence
  Synthetically generated peptide
  misc_feature (2)..(2): Xaa can be Cys or D-Cys
  misc_feature (14)..(14): Xaa can be Cys or D-Cys
KXCEYCCTPACTGXY

SEQ ID NO: 1089 - protein, 14 aa, Artificial Sequence
  Synthetically generated peptide
  misc_feature (2)..(2): Xaa can be Cys or D-Cys
  misc_feature (6)..(6): Xaa can be Cys or D-Cys
KXCEYXCNPACTGC

SEQ ID NO: 1090 - protein, 15 aa, Artificial Sequence
  Synthetically generated peptide
  misc_feature (2)..(2): Xaa can be Cys or D-Cys
  misc_feature (6)..(6): Xaa can be Cys or D-Cys
KXCEYXCNPACTGCK

SEQ ID NO: 1091 - protein, 15 aa, Artificial Sequence
  Synthetically generated peptide
  misc_feature (2)..(2): Xaa can be Cys or D-Cys
  misc_feature (6)..(6): Xaa can be Cys or D-Cys
KXCEYXCNPACTGCY

SEQ ID NO: 1092 - protein, 14 aa, Artificial Sequence
  Synthetically generated peptide
  misc_feature (2)..(2): Xaa can be Cys or D-Cys
  misc_feature (6)..(6): Xaa can be Cys or D-Cys
  misc_feature (14)..(14): Xaa can be Cys or D-Cys
KXCEYXCNPACTGX

SEQ ID NO: 1093 - protein, 15 aa, Artificial Sequence
  Synthetically generated peptide
  misc_feature (2)..(2): Xaa can be Cys or D-Cys
  misc_feature (6)..(6): Xaa can be Cys or D-Cys
  misc_feature (14)..(14): Xaa can be Cys or D-Cys
KXCEYXCNPACTGXK

SEQ ID NO: 1094 - protein, 15 aa, Artificial Sequence
  Synthetically generated peptide
  misc_feature (2)..(2): Xaa can be Cys or D-Cys
  misc_feature (6)..(6): Xaa can be Cys or D-Cys
  misc_feature (14)..(14): Xaa can be Cys or D-Cys
KXCEYXCNPACTGXY

SEQ ID NO: 1095 - protein, 14 aa, Artificial Sequence
  Synthetically generated peptide
  misc_feature (2)..(2): Xaa can be Cys or D-Cys
  misc_feature (6)..(6): Xaa can be Cys or D-Cys
KXCEYXCTPACTGC

SEQ ID NO: 1096 - protein, 15 aa, Artificial Sequence
  Synthetically generated peptide
  misc_feature (2)..(2): Xaa can be Cys or D-Cys
  misc_feature (6)..(6): Xaa can be Cys or D-Cys
KXCEYXCTPACTGCK

SEQ ID NO: 1097 - protein, 15 aa, Artificial Sequence
  Synthetically generated peptide
  misc_feature (2)..(2): Xaa can be Cys or D-Cys
  misc_feature (6)..(6): Xaa can be Cys or D-Cys
KXCEYXCTPACTGCY

SEQ ID NO: 1098 - protein, 14 aa, Artificial Sequence
  Synthetically generated peptide
  misc_feature (2)..(2): Xaa can be Cys or D-Cys
  misc_feature (6)..(6): Xaa can be Cys or D-Cys
  misc_feature (14)..(14): Xaa can be Cys or D-Cys
KXCEYXCTPACTGX

SEQ ID NO: 1099 - protein, 15 aa, Artificial Sequence
  Synthetically generated peptide
  misc_feature (2)..(2): Xaa can be Cys or D-Cys
  misc_feature (6)..(6): Xaa can be Cys or D-Cys
  misc_feature (14)..(14): Xaa can be Cys or D-Cys
KXCEYXCTPACTGXK

SEQ ID NO: 1100 - protein, 15 aa, Artificial Sequence
  Synthetically generated peptide
  misc_feature (2)..(2): Xaa can be Cys or D-Cys
  misc_feature (6)..(6): Xaa can be Cys or D-Cys
  misc_feature (14)..(14): Xaa can be Cys or D-Cys
KXCEYXCTPACTGXY

SEQ ID NO: 1101 - protein, 14 aa, Artificial Sequence
  Synthetically generated peptide
  misc_feature (2)..(2): Xaa can be Cys or D-Cys
KXCEFCCNPACTGC

SEQ ID NO: 1102 - protein, 15 aa, Artificial Sequence
  Synthetically generated peptide
  misc_feature (2)..(2): Xaa can be Cys or D-Cys
KXCEFCCNPACTGCK

SEQ ID NO: 1103 - protein, 15 aa, Artificial Sequence
  Synthetically generated peptide
  misc_feature (2)..(2): Xaa can be Cys or D-Cys
KXCEFCCNPACTGCY

SEQ ID NO: 1104 - protein, 14 aa, Artificial Sequence
  Synthetically generated peptide
  misc_feature (2)..(2): Xaa can be Cys or D-Cys
  misc_feature (14)..(14): Xaa can be Cys or D-Cys
KXCEFCCNPACTGX

SEQ ID NO: 1105 - protein, 15 aa, Artificial Sequence
  Synthetically generated peptide
  misc_feature (2)..(2): Xaa can be Cys or D-Cys
  misc_feature (14)..(14): Xaa can be Cys or D-Cys
KXCEFCCNPACTGXK

SEQ ID NO: 1106 - protein, 15 aa, Artificial Sequence
  Synthetically generated peptide
  misc_feature (2)..(2): Xaa can be Cys or D-Cys
  misc_feature (14)..(14): Xaa can be Cys or D-Cys
KXCEFCCNPACTGXY

SEQ ID NO: 1107 - protein, 14 aa, Artificial Sequence
  Synthetically generated peptide
  misc_feature (2)..(2): Xaa can be Cys or D-Cys
KXCEFCCTPACTGC

SEQ ID NO: 1108 - protein, 15 aa, Artificial Sequence
  Synthetically generated peptide
  misc_feature (2)..(2): Xaa can be Cys or D-Cys
KXCEFCCTPACTGCK

SEQ ID NO: 1109 - protein, 15 aa, Artificial Sequence
  Synthetically generated peptide
  misc_feature (2)..(2): Xaa can be Cys or D-Cys
KXCEFCCTPACTGCY

SEQ ID NO: 1110 - protein, 14 aa, Artificial Sequence
  Synthetically generated peptide
  misc_feature (2)..(2): Xaa can be Cys or D-Cys
  misc_feature (14)..(14): Xaa can be Cys or D-Cys
KXCEFCCTPACTGX

SEQ ID NO: 1111 - protein, 15 aa, Artificial Sequence
  Synthetically generated peptide
  misc_feature (2)..(2): Xaa can be Cys or D-Cys
  misc_feature (14)..(14): Xaa can be Cys or D-Cys
KXCEFCCTPACTGXK

SEQ ID NO: 1112 - protein, 15 aa, Artificial Sequence
  Synthetically generated peptide
  misc_feature (2)..(2): Xaa can be Cys or D-Cys
  misc_feature (14)..(14): Xaa can be Cys or D-Cys
KXCEFCCTPACTGXY

SEQ ID NO: 1113 - protein, 14 aa, Artificial Sequence
  Synthetically generated peptide
  misc_feature (2)..(2): Xaa can be Cys or D-Cys
  misc_feature (6)..(6): Xaa can be Cys or D-Cys
KXCEFXCNPACTGC

SEQ ID NO: 1114 - protein, 15 aa, Artificial Sequence
  Synthetically generated peptide
  misc_feature (2)..(2): Xaa can be Cys or D-Cys
  misc_feature (6)..(6): Xaa can be Cys or D-Cys
KXCEFXCNPACTGCK

SEQ ID NO: 1115 - protein, 15 aa, Artificial Sequence
  Synthetically generated peptide
  misc_feature (2)..(2): Xaa can be Cys or D-Cys
  misc_feature (6)..(6): Xaa can be Cys or D-Cys
KXCEFXCNPACTGCY

SEQ ID NO: 1116 - protein, 14 aa, Artificial Sequence
  Synthetically generated peptide
  misc_feature (2)..(2): Xaa can be Cys or D-Cys
  misc_feature (6)..(6): Xaa can be Cys or D-Cys
  misc_feature (14)..(14): Xaa can be Cys or D-Cys
KXCEFXCNPACTGX

SEQ ID NO: 1117 - protein, 15 aa, Artificial Sequence
  Synthetically generated peptide
  misc_feature (2)..(2): Xaa can be Cys or D-Cys
  misc_feature (6)..(6): Xaa can be Cys or D-Cys
  misc_feature (14)..(14): Xaa can be Cys or D-Cys
KXCEFXCNPACTGXK

SEQ ID NO: 1118 - protein, 15 aa, Artificial Sequence
  Synthetically generated peptide
  misc_feature (2)..(2): Xaa can be Cys or D-Cys
  misc_feature (6)..(6): Xaa can be Cys or D-Cys
  misc_feature (14)..(14): Xaa can be Cys or D-Cys
KXCEFXCNPACTGXY

SEQ ID NO: 1119 - protein, 14 aa, Artificial Sequence
  Synthetically generated peptide
  misc_feature (2)..(2): Xaa can be Cys or D-Cys
  misc_feature (6)..(6): Xaa can be Cys or D-Cys
KXCEFXCTPACTGC

SEQ ID NO: 1120 - protein, 15 aa, Artificial Sequence
  Synthetically generated peptide
  misc_feature (2)..(2): Xaa can be Cys or D-Cys
  misc_feature (6)..(6): Xaa can be Cys or D-Cys
KXCEFXCTPACTGCK

SEQ ID NO: 1121 - protein, 15 aa, Artificial Sequence
  Synthetically generated peptide
  misc_feature (2)..(2): Xaa can be Cys or D-Cys
  misc_feature (6)..(6): Xaa can be Cys or D-Cys
KXCEFXCTPACTGCY

SEQ ID NO: 1122 - protein, 14 aa, Artificial Sequence
  Synthetically generated peptide
  misc_feature (2)..(2): Xaa can be Cys or D-Cys
  misc_feature (6)..(6): Xaa can be Cys or D-Cys
  misc_feature (14)..(14): Xaa can be Cys or D-Cys
KXCEFXCTPACTGX

SEQ ID NO: 1123 - protein, 15 aa, Artificial Sequence
  Synthetically generated peptide
  misc_feature (2)..(2): Xaa can be Cys or D-Cys
  misc_feature (6)..(6): Xaa can be Cys or D-Cys
  misc_feature (14)..(14): Xaa can be Cys or D-Cys
KXCEFXCTPACTGXK

SEQ ID NO: 1124 - protein, 15 aa, Artificial Sequence
  Synthetically generated peptide
  misc_feature (2)..(2): Xaa can be Cys or D-Cys
  misc_feature (6)..(6): Xaa can be Cys or D-Cys
  misc_feature (14)..(14): Xaa can be Cys or D-Cys
KXCEFXCTPACTGXY

SEQ ID NO: 1125 - protein, 14 aa, Artificial Sequence
  Synthetically generated peptide
  misc_feature (2)..(2): Xaa can be Cys or D-Cys
KXCEWCCNPACTGC

SEQ ID NO: 1126 - protein, 15 aa, Artificial Sequence
  Synthetically generated peptide
  misc_feature (2)..(2): Xaa can be Cys or D-Cys
KXCEWCCNPACTGCK

SEQ ID NO: 1127 - protein, 15 aa, Artificial Sequence
  Synthetically generated peptide
  misc_feature (2)..(2): Xaa can be Cys or D-Cys
KXCEWCCNPACTGCY

SEQ ID NO: 1128 - protein, 14 aa, Artificial Sequence
  Synthetically generated peptide
  misc_feature (2)..(2): Xaa can be Cys or D-Cys
  misc_feature (14)..(14): Xaa can be Cys or D-Cys
KXCEWCCNPACTGX

SEQ ID NO: 1129 - protein, 15 aa, Artificial Sequence
  Synthetically generated peptide
  misc_feature (2)..(2): Xaa can be Cys or D-Cys
  misc_feature (14)..(14): Xaa can be Cys or D-Cys
KXCEWCCNPACTGXK

SEQ ID NO: 1130 - protein, 15 aa, Artificial Sequence
  Synthetically generated peptide
  misc_feature (2)..(2): Xaa can be Cys or D-Cys
  misc_feature (14)..(14): Xaa can be Cys or D-Cys
KXCEWCCNPACTGXY

SEQ ID NO: 1131 - protein, 14 aa, Artificial Sequence
  Synthetically generated peptide
  misc_feature (2)..(2): Xaa can be Cys or D-Cys
KXCEWCCTPACTGC

SEQ ID NO: 1132 - protein, 15 aa, Artificial Sequence
  Synthetically generated peptide
  misc_feature (2)..(2): Xaa can be Cys or D-Cys
KXCEWCCTPACTGCK

SEQ ID NO: 1133 - protein, 15 aa, Artificial Sequence
  Synthetically generated peptide
  misc_feature (2)..(2): Xaa can be Cys or D-Cys
KXCEWCCTPACTGCY

SEQ ID NO: 1134 - protein, 14 aa, Artificial Sequence
  Synthetically generated peptide
  misc_feature (2)..(2): Xaa can be Cys or D-Cys
  misc_feature (14)..(14): Xaa can be Cys or D-Cys
KXCEWCCTPACTGX

SEQ ID NO: 1135 - protein, 15 aa, Artificial Sequence
  Synthetically generated peptide
  misc_feature (2)..(2): Xaa can be Cys or D-Cys
  misc_feature (14)..(14): Xaa can be Cys or D-Cys
KXCEWCCTPACTGXK

SEQ ID NO: 1136 - protein, 15 aa, Artificial Sequence
  Synthetically generated peptide
  misc_feature (2)..(2): Xaa can be Cys or D-Cys
  misc_feature (14)..(14): Xaa can be Cys or D-Cys
KXCEWCCTPACTGXY

SEQ ID NO: 1137 - protein, 14 aa, Artificial Sequence
  Synthetically generated peptide
  misc_feature (2)..(2): Xaa can be Cys or D-Cys
  misc_feature (6)..(6): Xaa can be Cys or D-Cys
KXCEWXCNPACTGC

SEQ ID NO: 1138 - protein, 15 aa, Artificial Sequence
  Synthetically generated peptide
  misc_feature (2)..(2): Xaa can be Cys or D-Cys
  misc_feature (6)..(6): Xaa can be Cys or D-Cys
KXCEWXCNPACTGCK

SEQ ID NO: 1139 - protein, 15 aa, Artificial Sequence
  Synthetically generated peptide
  misc_feature (2)..(2): Xaa can be Cys or D-Cys
  misc_feature (6)..(6): Xaa can be Cys or D-Cys
KXCEWXCNPACTGCY

SEQ ID NO: 1140 - protein, 14 aa, Artificial Sequence
  Synthetically generated peptide
  misc_feature (2)..(2): Xaa can be Cys or D-Cys
  misc_feature (6)..(6): Xaa can be Cys or D-Cys
  misc_feature (14)..(14): Xaa can be Cys or D-Cys
KXCEWXCNPACTGX

SEQ ID NO: 1141 - protein, 15 aa, Artificial Sequence
  Synthetically generated peptide
  misc_feature (2)..(2): Xaa can be Cys or D-Cys
  misc_feature (6)..(6): Xaa can be Cys or D-Cys
  misc_feature (14)..(14): Xaa can be Cys or D-Cys
KXCEWXCNPACTGXK

SEQ ID NO: 1142 - protein, 15 aa, Artificial Sequence
  Synthetically generated peptide
  misc_feature (2)..(2): Xaa can be Cys or D-Cys
  misc_feature (6)..(6): Xaa can be Cys or D-Cys
  misc_feature (14)..(14): Xaa can be Cys or D-Cys
KXCEWXCNPACTGXY

SEQ ID NO: 1143 - protein, 14 aa, Artificial Sequence
  Synthetically generated peptide
  misc_feature (2)..(2): Xaa can be Cys or D-Cys
  misc_feature (6)..(6): Xaa can be Cys or D-Cys
KXCEWXCTPACTGC

SEQ ID NO: 1144 - protein, 15 aa, Artificial Sequence
  Synthetically generated peptide
  misc_feature (2)..(2): Xaa can be Cys or D-Cys
  misc_feature (6)..(6): Xaa can be Cys or D-Cys
KXCEWXCTPACTGCK

SEQ ID NO: 1145 - protein, 15 aa, Artificial Sequence
  Synthetically generated peptide
  misc_feature (2)..(2): Xaa can be Cys or D-Cys
  misc_feature (6)..(6): Xaa can be Cys or D-Cys
KXCEWXCTPACTGCY

SEQ ID NO: 1146 - protein, 14 aa, Artificial Sequence
  Synthetically generated peptide
  misc_feature (2)..(2): Xaa can be Cys or D-Cys
  misc_feature (6)..(6): Xaa can be Cys or D-Cys
  misc_feature (14)..(14): Xaa can be Cys or D-Cys
KXCEWXCTPACTGX

SEQ ID NO: 1147 - protein, 15 aa, Artificial Sequence
  Synthetically generated peptide
  misc_feature (2)..(2): Xaa can be Cys or D-Cys
  misc_feature (6)..(6): Xaa can be Cys or D-Cys
  misc_feature (14)..(14): Xaa can be Cys or D-Cys
KXCEWXCTPACTGXK

SEQ ID NO: 1148 - protein, 15 aa, Artificial Sequence
  Synthetically generated peptide
  misc_feature (2)..(2): Xaa can be Cys or D-Cys
  misc_feature (6)..(6): Xaa can be Cys or D-Cys
  misc_feature (14)..(14): Xaa can be Cys or D-Cys
KXCEWXCTPACTGXY

SEQ ID NO: 1149 - protein, 14 aa, Artificial Sequence
  Synthetically generated peptide
SCCEVCCNPACTGC

SEQ ID NO: 1150 - protein, 15 aa, Artificial Sequence
  Synthetically generated peptide
SCCEVCCNPACTGCK

SEQ ID NO: 1151 - protein, 15 aa, Artificial Sequence
  Synthetically generated peptide
SCCEVCCNPACTGCY

SEQ ID NO: 1152 - protein, 14 aa, Artificial Sequence
  Synthetically generated peptide
  misc_feature (14)..(14): Xaa can be Cys or D-Cys
SCCEVCCNPACTGX

SEQ ID NO: 1153 - protein, 15 aa, Artificial Sequence
  Synthetically generated peptide
  misc_feature (14)..(14): Xaa can be Cys or D-Cys
SCCEVCCNPACTGXK

SEQ ID NO: 1154 - protein, 15 aa, Artificial Sequence
  Synthetically generated peptide
  misc_feature (14)..(14): Xaa can be Cys or D-Cys
SCCEVCCNPACTGXY

SEQ ID NO: 1155 - protein, 14 aa, Artificial Sequence
  Synthetically generated peptide
SCCEVCCTPACTGC

SEQ ID NO: 1156 - protein, 15 aa, Artificial Sequence
  Synthetically generated peptide
SCCEVCCTPACTGCK

SEQ ID NO: 1157 - protein, 15 aa, Artificial Sequence
  Synthetically generated peptide
SCCEVCCTPACTGCY

SEQ ID NO: 1158 - protein, 14 aa, Artificial Sequence
  Synthetically generated peptide
  misc_feature (14)..(14): Xaa can be Cys or D-Cys
SCCEVCCTPACTGX

SEQ ID NO: 1159 - protein, 15 aa, Artificial Sequence
  Synthetically generated peptide
  misc_feature (14)..(14): Xaa can be Cys or D-Cys
SCCEVCCTPACTGXK

SEQ ID NO: 1160 - protein, 15 aa, Artificial Sequence
  Synthetically generated peptide
  misc_feature (14)..(14): Xaa can be Cys or D-Cys
SCCEVCCTPACTGXY

SEQ ID NO: 1161 - protein, 14 aa, Artificial Sequence
  Synthetically generated peptide
  misc_feature (6)..(6): Xaa can be Cys or D-Cys
SCCEVXCNPACTGC

SEQ ID NO: 1162 - protein, 15 aa, Artificial Sequence
  Synthetically generated peptide
  misc_feature (6)..(6): Xaa can be Cys or D-Cys
SCCEVXCNPACTGCK

SEQ ID NO: 1163 - protein, 15 aa, Artificial Sequence
  Synthetically generated peptide
  misc_feature (6)..(6): Xaa can be Cys or D-Cys
SCCEVXCNPACTGCY

SEQ ID NO: 1164 - protein, 14 aa, Artificial Sequence
  Synthetically generated peptide
  misc_feature (6)..(6): Xaa can be Cys or D-Cys
  misc_feature (14)..(14): Xaa can be Cys or D-Cys
SCCEVXCNPACTGX

SEQ ID NO: 1165 - protein, 15 aa, Artificial Sequence
  Synthetically generated peptide
  misc_feature (6)..(6): Xaa can be Cys or D-Cys
  misc_feature (14)..(14): Xaa can be Cys or D-Cys
SCCEVXCNPACTGXK

SEQ ID NO: 1166 - protein, 15 aa, Artificial Sequence
  Synthetically generated peptide
  misc_feature (6)..(6): Xaa can be Cys or D-Cys
  misc_feature (14)..(14): Xaa can be Cys or D-Cys
SCCEVXCNPACTGXY

SEQ ID NO: 1167 - protein, 14 aa, Artificial Sequence
  Synthetically generated peptide
  misc_feature (6)..(6): Xaa can be Cys or D-Cys
SCCEVXCTPACTGC

SEQ ID NO: 1168 - protein, 15 aa, Artificial Sequence
  Synthetically generated peptide
  misc_feature (6)..(6): Xaa can be Cys or D-Cys
SCCEVXCTPACTGCK

SEQ ID NO: 1169 - protein, 15 aa, Artificial Sequence
  Synthetically generated peptide
  misc_feature (6)..(6): Xaa can be Cys or D-Cys
SCCEVXCTPACTGCY

SEQ ID NO: 1170 - protein, 14 aa, Artificial Sequence
  Synthetically generated peptide
  misc_feature (6)..(6): Xaa can be Cys or D-Cys
  misc_feature (14)..(14): Xaa can be Cys or D-Cys
SCCEVXCTPACTGX

SEQ ID NO: 1171 - protein, 15 aa, Artificial Sequence
  Synthetically generated peptide
  misc_feature (6)..(6): Xaa can be Cys or D-Cys
  misc_feature (14)..(14): Xaa can be Cys or D-Cys
SCCEVXCTPACTGXK

SEQ ID NO: 1172 - protein, 15 aa, Artificial Sequence
  Synthetically generated peptide
  misc_feature (6)..(6): Xaa can be Cys or D-Cys
  misc_feature (14)..(14): Xaa can be Cys or D-Cys
SCCEVXCTPACTGXY

SEQ ID NO: 1173 - protein, 14 aa, Artificial Sequence
  Synthetically generated peptide
SCCEICCNPACTGC

SEQ ID NO: 1174 - protein, 15 aa, Artificial Sequence
  Synthetically generated peptide
SCCEICCNPACTGCK

SEQ ID NO: 1175 - protein, 15 aa, Artificial Sequence
  Synthetically generated peptide
SCCEICCNPACTGCY

SEQ ID NO: 1176 - protein, 14 aa, Artificial Sequence
  Synthetically generated peptide
  misc_feature (14)..(14): Xaa can be Cys or D-Cys
SCCEICCNPACTGX

SEQ ID NO: 1177 - protein, 15 aa, Artificial Sequence
  Synthetically generated peptide
  misc_feature (14)..(14): Xaa can be Cys or D-Cys
SCCEICCNPACTGXK

SEQ ID NO: 1178 - protein, 15 aa, Artificial Sequence
  Synthetically generated peptide
  misc_feature (14)..(14): Xaa can be Cys or D-Cys
SCCEICCNPACTGXY

SEQ ID NO: 1179 - protein, 14 aa, Artificial Sequence
  Synthetically generated peptide
SCCEICCTPACTGC

SEQ ID NO: 1180 - protein, 15 aa, Artificial Sequence
  Synthetically generated peptide
SCCEICCTPACTGCK

SEQ ID NO: 1181 - protein, 15 aa, Artificial Sequence
  Synthetically generated peptide
SCCEICCTPACTGCY

SEQ ID NO: 1182 - protein, 14 aa, Artificial Sequence
  Synthetically generated peptide
  misc_feature (14)..(14): Xaa can be Cys or D-Cys
SCCEICCTPACTGX

SEQ ID NO: 1183 - protein, 15 aa, Artificial Sequence
  Synthetically generated peptide
  misc_feature (14)..(14): Xaa can be Cys or D-Cys
SCCEICCTPACTGXK

SEQ ID NO: 1184 - protein, 15 aa, Artificial Sequence
  Synthetically generated peptide
  misc_feature (14)..(14): Xaa can be Cys or D-Cys
SCCEICCTPACTGXY

SEQ ID NO: 1185 - protein, 14 aa, Artificial Sequence
  Synthetically generated peptide
  misc_feature (6)..(6): Xaa can be Cys or D-Cys
SCCEIXCNPACTGC

SEQ ID NO: 1186 - protein, 15 aa, Artificial Sequence
  Synthetically generated peptide
  misc_feature (6)..(6): Xaa can be Cys or D-Cys
SCCEIXCNPACTGCK

SEQ ID NO: 1187 - protein, 15 aa, Artificial Sequence
  Synthetically generated peptide
  misc_feature (6)..(6): Xaa can be Cys or D-Cys
SCCEIXCNPACTGCY

SEQ ID NO: 1188 - protein, 14 aa, Artificial Sequence
  Synthetically generated peptide
  misc_feature (6)..(6): Xaa can be Cys or D-Cys
  misc_feature (14)..(14): Xaa can be Cys or D-Cys
SCCEIXCNPACTGX

SEQ ID NO: 1189 - protein, 15 aa, Artificial Sequence
  Synthetically generated peptide
  misc_feature (6)..(6): Xaa can be Cys or D-Cys
  misc_feature (14)..(14): Xaa can be Cys or D-Cys
SCCEIXCNPACTGXK

SEQ ID NO: 1190 - protein, 15 aa, Artificial Sequence
  Synthetically generated peptide
  misc_feature (6)..(6): Xaa can be Cys or D-Cys
  misc_feature (14)..(14): Xaa can be Cys or D-Cys
SCCEIXCNPACTGXY

SEQ ID NO: 1191 - protein, 14 aa, Artificial Sequence
  Synthetically generated peptide
  misc_feature (6)..(6): Xaa can be Cys or D-Cys
SCCEIXCTPACTGC

SEQ ID NO: 1192 - protein, 15 aa, Artificial Sequence
  Synthetically generated peptide
  misc_feature (6)..(6): Xaa can be Cys or D-Cys
SCCEIXCTPACTGCK

SEQ ID NO: 1193 - protein, 15 aa, Artificial Sequence
  Synthetically generated peptide
  misc_feature (6)..(6): Xaa can be Cys or D-Cys
SCCEIXCTPACTGCY

SEQ ID NO: 1194 - protein, 14 aa, Artificial Sequence
  Synthetically generated peptide
  misc_feature (6)..(6): Xaa can be Cys or D-Cys
  misc_feature (14)..(14): Xaa can be Cys or D-Cys
SCCEIXCTPACTGX

SEQ ID NO: 1195 - protein, 15 aa, Artificial Sequence
  Synthetically generated peptide
  misc_feature (6)..(6): Xaa can be Cys or D-Cys
  misc_feature (14)..(14): Xaa can be Cys or D-Cys
SCCEIXCTPACTGXK

SEQ ID NO: 1196 - protein, 15 aa, Artificial Sequence
  Synthetically generated peptide
  misc_feature (6)..(6): Xaa can be Cys or D-Cys
  misc_feature (14)..(14): Xaa can be Cys or D-Cys
SCCEIXCTPACTGXY

SEQ ID NO: 1197 - protein, 14 aa, Artificial Sequence
  Synthetically generated peptide
SCCELCCNPACTGC

SEQ ID NO: 1198 - protein, 15 aa, Artificial Sequence
  Synthetically generated peptide
SCCELCCNPACTGCK

SEQ ID NO: 1199 - protein, 15 aa, Artificial Sequence
  Synthetically generated peptide
SCCELCCNPACTGCY

SEQ ID NO: 1200 - protein, 14 aa, Artificial Sequence
  Synthetically generated peptide
  misc_feature (14)..(14): Xaa can be Cys or D-Cys
SCCELCCNPACTGX

SEQ ID NO: 1201 - protein, 15 aa, Artificial Sequence
  Synthetically generated peptide
  misc_feature (14)..(14): Xaa can be Cys or D-Cys
SCCELCCNPACTGXK

SEQ ID NO: 1202 - protein, 15 aa, Artificial Sequence
  Synthetically generated peptide
  misc_feature (14)..(14): Xaa can be Cys or D-Cys
SCCELCCNPACTGXY

SEQ ID NO: 1203 - protein, 14 aa, Artificial Sequence
  Synthetically generated peptide
SCCELCCTPACTGC

SEQ ID NO: 1204 - protein, 15 aa, Artificial Sequence
  Synthetically generated peptide
SCCELCCTPACTGCK

SEQ ID NO: 1205 - protein, 15 aa, Artificial Sequence
  Synthetically generated peptide
SCCELCCTPACTGCY

SEQ ID NO: 1206 - protein, 14 aa, Artificial Sequence
  Synthetically generated peptide
  misc_feature (14)..(14): Xaa can be Cys or D-Cys
SCCELCCTPACTGX

SEQ ID NO: 1207 - protein, 15 aa, Artificial Sequence
  Synthetically generated peptide
  misc_feature (14)..(14): Xaa can be Cys or D-Cys
SCCELCCTPACTGXK

SEQ ID NO: 1208 - protein, 15 aa, Artificial Sequence
  Synthetically generated peptide
  misc_feature (14)..(14): Xaa can be Cys or D-Cys
SCCELCCTPACTGXY

SEQ ID NO: 1209 - protein, 14 aa, Artificial Sequence
  Synthetically generated peptide
  misc_feature (6)..(6): Xaa can be Cys or D-Cys
SCCELXCNPACTGC

SEQ ID NO: 1210 - protein, 15 aa, Artificial Sequence
  Synthetically generated peptide
  misc_feature (6)..(6): Xaa can be Cys or D-Cys
SCCELXCNPACTGCK

SEQ ID NO: 1211 - protein, 15 aa, Artificial Sequence
  Synthetically generated peptide
  misc_feature (6)..(6): Xaa can be Cys or D-Cys
SCCELXCNPACTGCY

SEQ ID NO: 1212 - protein, 14 aa, Artificial Sequence
  Synthetically generated peptide
  misc_feature (6)..(6): Xaa can be Cys or D-Cys
  misc_feature (14)..(14): Xaa can be Cys or D-Cys
SCCELXCNPACTGX

SEQ ID NO: 1213 - protein, 15 aa, Artificial Sequence
  Synthetically generated peptide
  misc_feature (6)..(6): Xaa can be Cys or D-Cys
  misc_feature (14)..(14): Xaa can be Cys or D-Cys
SCCELXCNPACTGXK

SEQ ID NO: 1214 - protein, 15 aa, Artificial Sequence
  Synthetically generated peptide
  misc_feature (6)..(6): Xaa can be Cys or D-Cys
  misc_feature (14)..(14): Xaa can be Cys or D-Cys
SCCELXCNPACTGXY

SEQ ID NO: 1215 - protein, 14 aa, Artificial Sequence
  Synthetically generated peptide
  misc_feature (6)..(6): Xaa can be Cys or D-Cys
SCCELXCTPACTGC

SEQ ID NO: 1216 - protein, 15 aa, Artificial Sequence
  Synthetically generated peptide
  misc_feature (6)..(6): Xaa can be Cys or D-Cys
SCCELXCTPACTGCK

SEQ ID NO: 1217 - protein, 15 aa, Artificial Sequence
  Synthetically generated peptide
  misc_feature (6)..(6): Xaa can be Cys or D-Cys
SCCELXCTPACTGCY

SEQ ID NO: 1218 - protein, 14 aa, Artificial Sequence
  Synthetically generated peptide
  misc_feature (6)..(6): Xaa can be Cys or D-Cys
  misc_feature (14)..(14): Xaa can be Cys or D-Cys
SCCELXCTPACTGX

SEQ ID NO: 1219 - protein, 15 aa, Artificial Sequence
  Synthetically generated peptide
  misc_feature (6)..(6): Xaa can be Cys or D-Cys
  misc_feature (14)..(14): Xaa can be Cys or D-Cys
SCCELXCTPACTGXK

SEQ ID NO: 1220 - protein, 15 aa, Artificial Sequence
  Synthetically generated peptide
  misc_feature (6)..(6): Xaa can be Cys or D-Cys
  misc_feature (14)..(14): Xaa can be Cys or D-Cys
SCCELXCTPACTGXY

SEQ ID NO: 1221 - protein, 14 aa, Artificial Sequence
  Synthetically generated peptide
SCCEYCCNPACTGC

SEQ ID NO: 1222 - protein, 15 aa, Artificial Sequence
  Synthetically generated peptide
SCCEYCCNPACTGCK

SEQ ID NO: 1223 - protein, 15 aa, Artificial Sequence
  Synthetically generated peptide
SCCEYCCNPACTGCY

SEQ ID NO: 1224 - protein, 14 aa, Artificial Sequence
  Synthetically generated peptide
  misc_feature (14)..(14): Xaa can be Cys or D-Cys
SCCEYCCNPACTGX

SEQ ID NO: 1225 - protein, 15 aa, Artificial Sequence
  Synthetically generated peptide
  misc_feature (14)..(14): Xaa can be Cys or D-Cys
SCCEYCCNPACTGXK

SEQ ID NO: 1226 - protein, 15 aa, Artificial Sequence
  Synthetically generated peptide
  misc_feature (14)..(14): Xaa can be Cys or D-Cys
SCCEYCCNPACTGXY

SEQ ID NO: 1227 - protein, 14 aa, Artificial Sequence
  Synthetically generated peptide
SCCEYCCTPACTGC

SEQ ID NO: 1228 - protein, 15 aa, Artificial Sequence
  Synthetically generated peptide
SCCEYCCTPACTGCK

SEQ ID NO: 1229 - protein, 15 aa, Artificial Sequence
  Synthetically generated peptide
SCCEYCCTPACTGCY

SEQ ID NO: 1230 - protein, 14 aa, Artificial Sequence
  Synthetically generated peptide
  misc_feature (14)..(14): Xaa can be Cys or D-Cys
SCCEYCCTPACTGX

SEQ ID NO: 1231 - protein, 15 aa, Artificial Sequence
  Synthetically generated peptide
  misc_feature (14)..(14): Xaa can be Cys or D-Cys
SCCEYCCTPACTGXK

SEQ ID NO: 1232 - protein, 15 aa, Artificial Sequence
  Synthetically generated peptide
  misc_feature (14)..(14): Xaa can be Cys or D-Cys
SCCEYCCTPACTGXY

SEQ ID NO: 1233 - protein, 14 aa, Artificial Sequence
  Synthetically generated peptide
  misc_feature (6)..(6): Xaa can be Cys or D-Cys
SCCEYXCNPACTGC

SEQ ID NO: 1234 - protein, 15 aa, Artificial Sequence
  Synthetically generated peptide
  misc_feature (6)..(6): Xaa can be Cys or D-Cys
SCCEYXCNPACTGCK

SEQ ID NO: 1235 - protein, 15 aa, Artificial Sequence
  Synthetically generated peptide
  misc_feature (6)..(6): Xaa can be Cys or D-Cys
SCCEYXCNPACTGCY

SEQ ID NO: 1236 - protein, 14 aa, Artificial Sequence
  Synthetically generated peptide
  misc_feature (6)..(6): Xaa can be Cys or D-Cys
  misc_feature (14)..(14): Xaa can be Cys or D-Cys
SCCEYXCNPACTGX

SEQ ID NO: 1237 - protein, 15 aa, Artificial Sequence
  Synthetically generated peptide
  misc_feature (6)..(6): Xaa can be Cys or D-Cys
  misc_feature (14)..(14): Xaa can be Cys or D-Cys
SCCEYXCNPACTGXK

SEQ ID NO: 1238 - protein, 15 aa, Artificial Sequence
  Synthetically generated peptide
  misc_feature (6)..(6): Xaa can be Cys or D-Cys
  misc_feature (14)..(14): Xaa can be Cys or D-Cys
SCCEYXCNPACTGXY

SEQ ID NO: 1239 - protein, 14 aa, Artificial Sequence
  Synthetically generated peptide
  misc_feature (6)..(6): Xaa can be Cys or D-Cys
SCCEYXCTPACTGC

SEQ ID NO: 1240 - protein, 15 aa, Artificial Sequence
  Synthetically generated peptide
  misc_feature (6)..(6): Xaa can be Cys or D-Cys
SCCEYXCTPACTGCK

SEQ ID NO: 1241 - protein, 15 aa, Artificial Sequence
  Synthetically generated peptide
  misc_feature (6)..(6): Xaa can be Cys or D-Cys
SCCEYXCTPACTGCY

SEQ ID NO: 1242 - protein, 14 aa, Artificial Sequence
  Synthetically generated peptide
  misc_feature (6)..(6): Xaa can be Cys or D-Cys
  misc_feature (14)..(14): Xaa can be Cys or D-Cys
SCCEYXCTPACTGX

SEQ ID NO: 1243 - protein, 15 aa, Artificial Sequence
  Synthetically generated peptide
  misc_feature (6)..(6): Xaa can be Cys or D-Cys
  misc_feature (14)..(14): Xaa can be Cys or D-Cys
SCCEYXCTPACTGXK

SEQ ID NO: 1244 - protein, 15 aa, Artificial Sequence
  Synthetically generated peptide
  misc_feature (6)..(6): Xaa can be Cys or D-Cys
  misc_feature (14)..(14): Xaa can be Cys or D-Cys
SCCEYXCTPACTGXY

SEQ ID NO: 1245 - protein, 14 aa, Artificial Sequence
  Synthetically generated peptide
SCCEFCCNPACTGC

SEQ ID NO: 1246 - protein, 15 aa, Artificial Sequence
  Synthetically generated peptide
SCCEFCCNPACTGCK

SEQ ID NO: 1247 - protein, 15 aa, Artificial Sequence
  Synthetically generated peptide
SCCEFCCNPACTGCY

SEQ ID NO: 1248 - protein, 14 aa, Artificial Sequence
  Synthetically generated peptide
  misc_feature (14)..(14): Xaa can be Cys or D-Cys
SCCEFCCNPACTGX

SEQ ID NO: 1249 - protein, 15 aa, Artificial Sequence
  Synthetically generated peptide
  misc_feature (14)..(14): Xaa can be Cys or D-Cys
SCCEFCCNPACTGXK

SEQ ID NO: 1250 - protein, 15 aa, Artificial Sequence
  Synthetically generated peptide
  misc_feature (14)..(14): Xaa can be Cys or D-Cys
SCCEFCCNPACTGXY

SEQ ID NO: 1251 - protein, 14 aa, Artificial Sequence
  Synthetically generated peptide
SCCEFCCTPACTGC

SEQ ID NO: 1252 - protein, 15 aa, Artificial Sequence
  Synthetically generated peptide
SCCEFCCTPACTGCK

SEQ ID NO: 1253 - protein, 15 aa, Artificial Sequence
  Synthetically generated peptide
SCCEFCCTPACTGCY

SEQ ID NO: 1254 - protein, 14 aa, Artificial Sequence
  Synthetically generated peptide
  misc_feature (14)..(14): Xaa can be Cys or D-Cys
SCCEFCCTPACTGX

SEQ ID NO: 1255 - protein, 15 aa, Artificial Sequence
  Synthetically generated peptide
  misc_feature (14)..(14): Xaa can be Cys or D-Cys
SCCEFCCTPACTGXK

SEQ ID NO: 1256 - protein, 15 aa, Artificial Sequence
  Synthetically generated peptide
  misc_feature (14)..(14): Xaa can be Cys or D-Cys
SCCEFCCTPACTGXY

SEQ ID NO: 1257 - protein, 14 aa, Artificial Sequence
  Synthetically generated peptide
  misc_feature (6)..(6): Xaa can be Cys or D-Cys
SCCEFXCNPACTGC

SEQ ID NO: 1258 - protein, 15 aa, Artificial Sequence
  Synthetically generated peptide
  misc_feature (6)..(6): Xaa can be Cys or D-Cys
SCCEFXCNPACTGCK

SEQ ID NO: 1259 - protein, 15 aa, Artificial Sequence
  Synthetically generated peptide
  misc_feature (6)..(6): Xaa can be Cys or D-Cys
SCCEFXCNPACTGCY

SEQ ID NO: 1260 - protein, 14 aa, Artificial Sequence
  Synthetically generated peptide
  misc_feature (6)..(6): Xaa can be Cys or D-Cys
  misc_feature (14)..(14): Xaa can be Cys or D-Cys
SCCEFXCNPACTGX

SEQ ID NO: 1261 - protein, 15 aa, Artificial Sequence
  Synthetically generated peptide
  misc_feature (6)..(6): Xaa can be Cys or D-Cys
  misc_feature (14)..(14): Xaa can be Cys or D-Cys
SCCEFXCNPACTGXK

SEQ ID NO: 1262 - protein, 15 aa, Artificial Sequence
  Synthetically generated peptide
  misc_feature (6)..(6): Xaa can be Cys or D-Cys
  misc_feature (14)..(14): Xaa can be Cys or D-Cys
SCCEFXCNPACTGXY

SEQ ID NO: 1263 - protein, 14 aa, Artificial Sequence
  Synthetically generated peptide
  misc_feature (6)..(6): Xaa can be Cys or D-Cys
SCCEFXCTPACTGC

SEQ ID NO: 1264 - protein, 15 aa, Artificial Sequence
  Synthetically generated peptide
  misc_feature (6)..(6): Xaa can be Cys or D-Cys
SCCEFXCTPACTGCK

SEQ ID NO: 1265 - protein, 15 aa, Artificial Sequence
  Synthetically generated peptide
  misc_feature (6)..(6): Xaa can be Cys or D-Cys
SCCEFXCTPACTGCY

SEQ ID NO: 1266 - protein, 14 aa, Artificial Sequence
  Synthetically generated peptide
  misc_feature (6)..(6): Xaa can be Cys or D-Cys
  misc_feature (14)..(14): Xaa can be Cys or D-Cys
SCCEFXCTPACTGX

SEQ ID NO: 1267 - protein, 15 aa, Artificial Sequence
  Synthetically generated peptide
  misc_feature (6)..(6): Xaa can be Cys or D-Cys
  misc_feature (14)..(14): Xaa can be Cys or D-Cys
SCCEFXCTPACTGXK

SEQ ID NO: 1268 - protein, 15 aa, Artificial Sequence
  Synthetically generated peptide
  misc_feature (6)..(6): Xaa can be Cys or D-Cys
  misc_feature (14)..(14): Xaa can be Cys or D-Cys
SCCEFXCTPACTGXY

SEQ ID NO: 1269 - protein, 14 aa, Artificial Sequence
  Synthetically generated peptide
SCCEWCCNPACTGC

SEQ ID NO: 1270 - protein, 15 aa, Artificial Sequence
  Synthetically generated peptide
SCCEWCCNPACTGCK

SEQ ID NO: 1271 - protein, 15 aa, Artificial Sequence
  Synthetically generated peptide
SCCEWCCNPACTGCY

SEQ ID NO: 1272 - protein, 14 aa, Artificial Sequence
  Synthetically generated peptide
  misc_feature (14)..(14): Xaa can be Cys or D-Cys
SCCEWCCNPACTGX

SEQ ID NO: 1273 - protein, 15 aa, Artificial Sequence
  Synthetically generated peptide
  misc_feature (14)..(14): Xaa can be Cys or D-Cys
SCCEWCCNPACTGXK

SEQ ID NO: 1274 - protein, 15 aa, Artificial Sequence
  Synthetically generated peptide
  misc_feature (14)..(14): Xaa can be Cys or D-Cys
SCCEWCCNPACTGXY

SEQ ID NO: 1275 - protein, 14 aa, Artificial Sequence
  Synthetically generated peptide
SCCEWCCTPACTGC

SEQ ID NO: 1276 - protein, 15 aa, Artificial Sequence
  Synthetically generated peptide
SCCEWCCTPACTGCK

SEQ ID NO: 1277 - protein, 15 aa, Artificial Sequence
  Synthetically generated peptide
SCCEWCCTPACTGCY

SEQ ID NO: 1278 - protein, 14 aa, Artificial Sequence
  Synthetically generated peptide
  misc_feature (14)..(14): Xaa can be Cys or D-Cys
SCCEWCCTPACTGX

SEQ ID NO: 1279 - protein, 15 aa, Artificial Sequence
  Synthetically generated peptide
  misc_feature (14)..(14): Xaa can be Cys or D-Cys
SCCEWCCTPACTGXK

SEQ ID NO: 1280 - protein, 15 aa, Artificial Sequence
  Synthetically generated peptide
  misc_feature (14)..(14): Xaa can be Cys or D-Cys
SCCEWCCTPACTGXY

SEQ ID NO: 1281 - protein, 14 aa, Artificial Sequence
  Synthetically generated peptide
  misc_feature (6)..(6): Xaa can be Cys or D-Cys
SCCEWXCNPACTGC

SEQ ID NO: 1282 - protein, 15 aa, Artificial Sequence
  Synthetically generated peptide
  misc_feature (6)..(6): Xaa can be Cys or D-Cys
SCCEWXCNPACTGCK

SEQ ID NO: 1283 - protein, 15 aa, Artificial Sequence
  Synthetically generated peptide
  misc_feature (6)..(6): Xaa can be Cys or D-Cys
SCCEWXCNPACTGCY

SEQ ID NO: 1284 - protein, 14 aa, Artificial Sequence
  Synthetically generated peptide
  misc_feature (6)..(6): Xaa can be Cys or D-Cys
  misc_feature (14)..(14): Xaa can be Cys or D-Cys
SCCEWXCNPACTGX

SEQ ID NO: 1285 - protein, 15 aa, Artificial Sequence
  Synthetically generated peptide
  misc_feature (6)..(6): Xaa can be Cys or D-Cys
  misc_feature (14)..(14): Xaa can be Cys or D-Cys
SCCEWXCNPACTGXK

SEQ ID NO: 1286 - protein, 15 aa, Artificial Sequence
  Synthetically generated peptide
  misc_feature (6)..(6): Xaa can be Cys or D-Cys
  misc_feature (14)..(14): Xaa can be Cys or D-Cys
SCCEWXCNPACTGXY

SEQ ID NO: 1287 - protein, 14 aa, Artificial Sequence
  Synthetically generated peptide
  misc_feature (6)..(6): Xaa can be Cys or D-Cys
SCCEWXCTPACTGC

SEQ ID NO: 1288 - protein, 15 aa, Artificial Sequence
  Synthetically generated peptide
  misc_feature (6)..(6): Xaa can be Cys or D-Cys
SCCEWXCTPACTGCK

SEQ ID NO: 1289 - protein, 15 aa, Artificial Sequence
  Synthetically generated peptide
  misc_feature (6)..(6): Xaa can be Cys or D-Cys
SCCEWXCTPACTGCY

SEQ ID NO: 1290 - protein, 14 aa, Artificial Sequence
  Synthetically generated peptide
  misc_feature (6)..(6): Xaa can be Cys or D-Cys
  misc_feature (14)..(14): Xaa can be Cys or D-Cys
SCCEWXCTPACTGX

SEQ ID NO: 1291 - protein, 15 aa, Artificial Sequence
  Synthetically generated peptide
  misc_feature (6)..(6): Xaa can be Cys or D-Cys
  misc_feature (14)..(14): Xaa can be Cys or D-Cys
SCCEWXCTPACTGXK

SEQ ID NO: 1292 - protein, 15 aa, Artificial Sequence
  Synthetically generated peptide
  misc_feature (6)..(6): Xaa can be Cys or D-Cys
  misc_feature (14)..(14): Xaa can be Cys or D-Cys
SCCEWXCTPACTGXY

SEQ ID NO: 1293 - protein, 14 aa, Artificial Sequence
  Synthetically generated peptide
  misc_feature (2)..(2): Xaa can be Cys or D-Cys
SXCEVCCNPACTGC

SEQ ID NO: 1294 - protein, 15 aa, Artificial Sequence
  Synthetically generated peptide
  misc_feature (2)..(2): Xaa can be Cys or D-Cys
SXCEVCCNPACTGCK

SEQ ID NO: 1295 - protein, 15 aa, Artificial Sequence
  Synthetically generated peptide
  misc_feature (2)..(2): Xaa can be Cys or D-Cys
SXCEVCCNPACTGCY

SEQ ID NO: 1296 - protein, 14 aa, Artificial Sequence
  Synthetically generated peptide
  misc_feature (2)..(2): Xaa can be Cys or D-Cys
  misc_feature (14)..(14): Xaa can be Cys or D-Cys
SXCEVCCNPACTGX

SEQ ID NO: 1297 - protein, 15 aa, Artificial Sequence
  Synthetically generated peptide
  misc_feature (2)..(2): Xaa can be Cys or D-Cys
  misc_feature (14)..(14): Xaa can be Cys or D-Cys
SXCEVCCNPACTGXK

SEQ ID NO: 1298 - protein, 15 aa, Artificial Sequence
  Synthetically generated peptide
  misc_feature (2)..(2): Xaa can be Cys or D-Cys
  misc_feature (14)..(14): Xaa can be Cys or D-Cys
SXCEVCCNPACTGXY

SEQ ID NO: 1299 - protein, 14 aa, Artificial Sequence
  Synthetically generated peptide
  misc_feature (2)..(2): Xaa can be Cys or D-Cys
SXCEVCCTPACTGC

SEQ ID NO: 1300 - protein, 15 aa, Artificial Sequence
  Synthetically generated peptide
  misc_feature (2)..(2): Xaa can be Cys or D-Cys
SXCEVCCTPACTGCK

SEQ ID NO: 1301 - protein, 15 aa, Artificial Sequence
  Synthetically generated peptide
  misc_feature (2)..(2): Xaa can be Cys or D-Cys
SXCEVCCTPACTGCY

SEQ ID NO: 1302 - protein, 14 aa, Artificial Sequence
  Synthetically generated peptide
  misc_feature (2)..(2): Xaa can be Cys or D-Cys
  misc_feature (14)..(14): Xaa can be Cys or D-Cys
SXCEVCCTPACTGX

SEQ ID NO: 1303 - protein, 15 aa, Artificial Sequence
  Synthetically generated peptide
  misc_feature (2)..(2): Xaa can be Cys or D-Cys
  misc_feature (14)..(14): Xaa can be Cys or D-Cys
SXCEVCCTPACTGXK

SEQ ID NO: 1304 - protein, 15 aa, Artificial Sequence
  Synthetically generated peptide
  misc_feature (2)..(2): Xaa can be Cys or D-Cys
  misc_feature (14)..(14): Xaa can be Cys or D-Cys
SXCEVCCTPACTGXY

SEQ ID NO: 1305 - protein, 14 aa, Artificial Sequence
  Synthetically generated peptide
  misc_feature (2)..(2): Xaa can be Cys or D-Cys
  misc_feature (6)..(6): Xaa can be Cys or D-Cys
SXCEVXCNPACTGC

SEQ ID NO: 1306 - protein, 15 aa, Artificial Sequence
  Synthetically generated peptide
  misc_feature (2)..(2): Xaa can be Cys or D-Cys
  misc_feature (6)..(6): Xaa can be Cys or D-Cys
SXCEVXCNPACTGCK

SEQ ID NO: 1307 - protein, 15 aa, Artificial Sequence
  Synthetically generated peptide
  misc_feature (2)..(2): Xaa can be Cys or D-Cys
  misc_feature (6)..(6): Xaa can be Cys or D-Cys
SXCEVXCNPACTGCY

SEQ ID NO: 1308 - protein, 14 aa, Artificial Sequence
  Synthetically generated peptide
  misc_feature (2)..(2): Xaa can be Cys or D-Cys
  misc_feature (6)..(6): Xaa can be Cys or D-Cys
  misc_feature (14)..(14): Xaa can be Cys or D-Cys
SXCEVXCNPACTGX

SEQ ID NO: 1309 - protein, 15 aa, Artificial Sequence
  Synthetically generated peptide
  misc_feature (2)..(2): Xaa can be Cys or D-Cys
  misc_feature (6)..(6): Xaa can be Cys or D-Cys
  misc_feature (14)..(14): Xaa can be Cys or D-Cys
SXCEVXCNPACTGXK

SEQ ID NO: 1310 - protein, 15 aa, Artificial Sequence
  Synthetically generated peptide
  misc_feature (2)..(2): Xaa can be Cys or D-Cys
  misc_feature (6)..(6): Xaa can be Cys or D-Cys
  misc_feature (14)..(14): Xaa can be Cys or D-Cys
SXCEVXCNPACTGXY

SEQ ID NO: 1311 - protein, 14 aa, Artificial Sequence
  Synthetically generated peptide
  misc_feature (2)..(2): Xaa can be Cys or D-Cys
  misc_feature (6)..(6): Xaa can be Cys or D-Cys
SXCEVXCTPACTGC

SEQ ID NO: 1312 - protein, 15 aa, Artificial Sequence
  Synthetically generated peptide
  misc_feature (2)..(2): Xaa can be Cys or D-Cys
  misc_feature (6)..(6): Xaa can be Cys or D-Cys
SXCEVXCTPACTGCK

SEQ ID NO: 1313 - protein, 15 aa, Artificial Sequence
  Synthetically generated peptide
  misc_feature (2)..(2): Xaa can be Cys or D-Cys
  misc_feature (6)..(6): Xaa can be Cys or D-Cys
SXCEVXCTPACTGCY

SEQ ID NO: 1314 - protein, 14 aa, Artificial Sequence
  Synthetically generated peptide
  misc_feature (2)..(2): Xaa can be Cys or D-Cys
  misc_feature (6)..(6): Xaa can be Cys or D-Cys
  misc_feature (14)..(14): Xaa can be Cys or D-Cys
SXCEVXCTPACTGX

SEQ ID NO: 1315 - protein, 15 aa, Artificial Sequence
  Synthetically generated peptide
  misc_feature (2)..(2): Xaa can be Cys or D-Cys
  misc_feature (6)..(6): Xaa can be Cys or D-Cys
  misc_feature (14)..(14): Xaa can be Cys or D-Cys
SXCEVXCTPACTGXK

SEQ ID NO: 1316 - protein, 15 aa, Artificial Sequence
  Synthetically generated peptide
  misc_feature (2)..(2): Xaa can be Cys or D-Cys
  misc_feature (6)..(6): Xaa can be Cys or D-Cys
  misc_feature (14)..(14): Xaa can be Cys or D-Cys
SXCEVXCTPACTGXY

SEQ ID NO: 1317 - protein, 14 aa, Artificial Sequence
  Synthetically generated peptide
  misc_feature (2)..(2): Xaa can be Cys or D-Cys
SXCEICCNPACTGC

SEQ ID NO: 1318 - protein, 15 aa, Artificial Sequence
  Synthetically generated peptide
  misc_feature (2)..(2): Xaa can be Cys or D-Cys
SXCEICCNPACTGCK

SEQ ID NO: 1319 - protein, 15 aa, Artificial Sequence
  Synthetically generated peptide
  misc_feature (2)..(2): Xaa can be Cys or D-Cys
SXCEICCNPACTGCY

SEQ ID NO: 1320 - protein, 14 aa, Artificial Sequence
  Synthetically generated peptide
  misc_feature (2)..(2): Xaa can be Cys or D-Cys
  misc_feature (14)..(14): Xaa can be Cys or D-Cys
SXCEICCNPACTGX

SEQ ID NO: 1321 - protein, 15 aa, Artificial Sequence
  Synthetically generated peptide
  misc_feature (2)..(2): Xaa can be Cys or D-Cys
  misc_feature (14)..(14): Xaa can be Cys or D-Cys
SXCEICCNPACTGXK

SEQ ID NO: 1322 - protein, 15 aa, Artificial Sequence
  Synthetically generated peptide
  misc_feature (2)..(2): Xaa can be Cys or D-Cys
  misc_feature (14)..(14): Xaa can be Cys or D-Cys
SXCEICCNPACTGXY

SEQ ID NO: 1323 - protein, 14 aa, Artificial Sequence
  Synthetically generated peptide
  misc_feature (2)..(2): Xaa can be Cys or D-Cys
SXCEICCTPACTGC

SEQ ID NO: 1324 - protein, 15 aa, Artificial Sequence
  Synthetically generated peptide
  misc_feature (2)..(2): Xaa can be Cys or D-Cys
SXCEICCTPACTGCK

SEQ ID NO: 1325 - protein, 15 aa, Artificial Sequence
  Synthetically generated peptide
  misc_feature (2)..(2): Xaa can be Cys or D-Cys
SXCEICCTPACTGCY

SEQ ID NO: 1326 - protein, 14 aa, Artificial Sequence
  Synthetically generated peptide
  misc_feature (2)..(2): Xaa can be Cys or D-Cys
  misc_feature (14)..(14): Xaa can be Cys or D-Cys
SXCEICCTPACTGX

SEQ ID NO: 1327 - protein, 15 aa, Artificial Sequence
  Synthetically generated peptide
  misc_feature (2)..(2): Xaa can be Cys or D-Cys
  misc_feature (14)..(14): Xaa can be Cys or D-Cys
SXCEICCTPACTGXK

SEQ ID NO: 1328 - protein, 15 aa, Artificial Sequence
  Synthetically generated peptide
  misc_feature (2)..(2): Xaa can be Cys or D-Cys
  misc_feature (14)..(14): Xaa can be Cys or D-Cys
SXCEICCTPACTGXY

SEQ ID NO: 1329 - protein, 14 aa, Artificial Sequence
  Synthetically generated peptide
  misc_feature (2)..(2): Xaa can be Cys or D-Cys
  misc_feature (6)..(6): Xaa can be Cys or D-Cys
SXCEIXCNPACTGC

SEQ ID NO: 1330 - protein, 15 aa, Artificial Sequence
  Synthetically generated peptide
  misc_feature (2)..(2): Xaa can be Cys or D-Cys
  misc_feature (6)..(6): Xaa can be Cys or D-Cys
SXCEIXCNPACTGCK

SEQ ID NO: 1331 - protein, 15 aa, Artificial Sequence
  Synthetically generated peptide
  misc_feature (2)..(2): Xaa can be Cys or D-Cys
  misc_feature (6)..(6): Xaa can be Cys or D-Cys
SXCEIXCNPACTGCY

SEQ ID NO: 1332 - protein, 14 aa, Artificial Sequence
  Synthetically generated peptide
  misc_feature (2)..(2): Xaa can be Cys or D-Cys
  misc_feature (6)..(6): Xaa can be Cys or D-Cys
  misc_feature (14)..(14): Xaa can be Cys or D-Cys
SXCEIXCNPACTGX

SEQ ID NO: 1333 - protein, 15 aa, Artificial Sequence
  Synthetically generated peptide
  misc_feature (2)..(2): Xaa can be Cys or D-Cys
  misc_feature (6)..(6): Xaa can be Cys or D-Cys
  misc_feature (14)..(14): Xaa can be Cys or D-Cys
SXCEIXCNPACTGXK

SEQ ID NO: 1334 - protein, 15 aa, Artificial Sequence
  Synthetically generated peptide
  misc_feature (2)..(2): Xaa can be Cys or D-Cys
  misc_feature (6)..(6): Xaa can be Cys or D-Cys
  misc_feature (14)..(14): Xaa can be Cys or D-Cys
SXCEIXCNPACTGXY

SEQ ID NO: 1335 - protein, 14 aa, Artificial Sequence
  Synthetically generated peptide
  misc_feature (2)..(2): Xaa can be Cys or D-Cys
  misc_feature (6)..(6): Xaa can be Cys or D-Cys
SXCEIXCTPACTGC

SEQ ID NO: 1336 - protein, 15 aa, Artificial Sequence
  Synthetically generated peptide
  misc_feature (2)..(2): Xaa can be Cys or D-Cys
  misc_feature (6)..(6): Xaa can be Cys or D-Cys
SXCEIXCTPACTGCK

SEQ ID NO: 1337 - protein, 15 aa, Artificial Sequence
  Synthetically generated peptide
  misc_feature (2)..(2): Xaa can be Cys or D-Cys
  misc_feature (6)..(6): Xaa can be Cys or D-Cys
SXCEIXCTPACTGCY

SEQ ID NO: 1338 - protein, 14 aa, Artificial Sequence
  Synthetically generated peptide
  misc_feature (2)..(2): Xaa can be Cys or D-Cys
  misc_feature (6)..(6): Xaa can be Cys or D-Cys
  misc_feature (14)..(14): Xaa can be Cys or D-Cys
SXCEIXCTPACTGX

SEQ ID NO: 1339 - protein, 15 aa, Artificial Sequence
  Synthetically generated peptide
  misc_feature (2)..(2): Xaa can be Cys or D-Cys
  misc_feature (6)..(6): Xaa can be Cys or D-Cys
  misc_feature (14)..(14): Xaa can be Cys or D-Cys
SXCEIXCTPACTGXK

SEQ ID NO: 1340 - protein, 15 aa, Artificial Sequence
  Synthetically generated peptide
  misc_feature (2)..(2): Xaa can be Cys or D-Cys
  misc_feature (6)..(6): Xaa can be Cys or D-Cys
  misc_feature (14)..(14): Xaa can be Cys or D-Cys
SXCEIXCTPACTGXY

SEQ ID NO: 1341 - protein, 14 aa, Artificial Sequence
  Synthetically generated peptide
  misc_feature (2)..(2): Xaa can be Cys or D-Cys
SXCELCCNPACTGC

SEQ ID NO: 1342 - protein, 15 aa, Artificial Sequence
  Synthetically generated peptide
  misc_feature (2)..(2): Xaa can be Cys or D-Cys
SXCELCCNPACTGCK

SEQ ID NO: 1343 - protein, 15 aa, Artificial Sequence
  Synthetically generated peptide
  misc_feature (2)..(2): Xaa can be Cys or D-Cys
SXCELCCNPACTGCY

SEQ ID NO: 1344 - protein, 14 aa, Artificial Sequence
  Synthetically generated peptide
  misc_feature (2)..(2): Xaa can be Cys or D-Cys
  misc_feature (14)..(14): Xaa can be Cys or D-Cys
SXCELCCNPACTGX

SEQ ID NO: 1345 - protein, 15 aa, Artificial Sequence
  Synthetically generated peptide
  misc_feature (2)..(2): Xaa can be Cys or D-Cys
  misc_feature (14)..(14): Xaa can be Cys or D-Cys
SXCELCCNPACTGXK

SEQ ID NO: 1346 - protein, 15 aa, Artificial Sequence
  Synthetically generated peptide
  misc_feature (2)..(2): Xaa can be Cys or D-Cys
  misc_feature (14)..(14): Xaa can be Cys or D-Cys
SXCELCCNPACTGXY

SEQ ID NO: 1347 - protein, 14 aa, Artificial Sequence
  Synthetically generated peptide
  misc_feature (2)..(2): Xaa can be Cys or D-Cys
SXCELCCTPACTGC

SEQ ID NO: 1348 - protein, 15 aa, Artificial Sequence
  Synthetically generated peptide
  misc_feature (2)..(2): Xaa can be Cys or D-Cys
SXCELCCTPACTGCK

SEQ ID NO: 1349 - protein, 15 aa, Artificial Sequence
  Synthetically generated peptide
  misc_feature (2)..(2): Xaa can be Cys or D-Cys
SXCELCCTPACTGCY

SEQ ID NO: 1350 - protein, 14 aa, Artificial Sequence
  Synthetically generated peptide
  misc_feature (2)..(2): Xaa can be Cys or D-Cys
  misc_feature (14)..(14): Xaa can be Cys or D-Cys
SXCELCCTPACTGX

SEQ ID NO: 1351 - protein, 15 aa, Artificial Sequence
  Synthetically generated peptide
  misc_feature (2)..(2): Xaa can be Cys or D-Cys
  misc_feature (14)..(14): Xaa can be Cys or D-Cys
SXCELCCTPACTGXK

SEQ ID NO: 1352 - protein, 15 aa, Artificial Sequence
  Synthetically generated peptide
  misc_feature (2)..(2): Xaa can be Cys or D-Cys
  misc_feature (14)..(14): Xaa can be Cys or D-Cys
SXCELCCTPACTGXY

SEQ ID NO: 1353 - protein, 14 aa, Artificial Sequence
  Synthetically generated peptide
  misc_feature (2)..(2): Xaa can be Cys or D-Cys
  misc_feature (6)..(6): Xaa can be Cys or D-Cys
SXCELXCNPACTGC

SEQ ID NO: 1354 - protein, 15 aa, Artificial Sequence
  Synthetically generated peptide
  misc_feature (2)..(2): Xaa can be Cys or D-Cys
  misc_feature (6)..(6): Xaa can be Cys or D-Cys
SXCELXCNPACTGCK

SEQ ID NO: 1355 - protein, 15 aa, Artificial Sequence
  Synthetically generated peptide
  misc_feature (2)..(2): Xaa can be Cys or D-Cys
  misc_feature (6)..(6): Xaa can be Cys or D-Cys
SXCELXCNPACTGCY

SEQ ID NO: 1356 - protein, 14 aa, Artificial Sequence
  Synthetically generated peptide
  misc_feature (2)..(2): Xaa can be Cys or D-Cys
  misc_feature (6)..(6): Xaa can be Cys or D-Cys
  misc_feature (14)..(14): Xaa can be Cys or D-Cys
SXCELXCNPACTGX

SEQ ID NO: 1357 - protein, 15 aa, Artificial Sequence
  Synthetically generated peptide
  misc_feature (2)..(2): Xaa can be Cys or D-Cys
  misc_feature (6)..(6): Xaa can be Cys or D-Cys
  misc_feature (14)..(14): Xaa can be Cys or D-Cys
SXCELXCNPACTGXK

SEQ ID NO: 1358 - protein, 15 aa, Artificial Sequence
  Synthetically generated peptide
  misc_feature (2)..(2): Xaa can be Cys or D-Cys
  misc_feature (6)..(6): Xaa can be Cys or D-Cys
  misc_feature (14)..(14): Xaa can be Cys or D-Cys
SXCELXCNPACTGXY

SEQ ID NO: 1359 - protein, 14 aa, Artificial Sequence
  Synthetically generated peptide
  misc_feature (2)..(2): Xaa can be Cys or D-Cys
  misc_feature (6)..(6): Xaa can be Cys or D-Cys
SXCELXCTPACTGC

SEQ ID NO: 1360 - protein, 15 aa, Artificial Sequence
  Synthetically generated peptide
  misc_feature (2)..(2): Xaa can be Cys or D-Cys
  misc_feature (6)..(6): Xaa can be Cys or D-Cys
SXCELXCTPACTGCK

SEQ ID NO: 1361 - protein, 15 aa, Artificial Sequence
  Synthetically generated peptide
  misc_feature (2)..(2): Xaa can be Cys or D-Cys
  misc_feature (6)..(6): Xaa can be Cys or D-Cys
SXCELXCTPACTGCY

SEQ ID NO: 1362 - protein, 14 aa, Artificial Sequence
  Synthetically generated peptide
  misc_feature (2)..(2): Xaa can be Cys or D-Cys
  misc_feature (6)..(6): Xaa can be Cys or D-Cys
  misc_feature (14)..(14): Xaa can be Cys or D-Cys
SXCELXCTPACTGX

SEQ ID NO: 1363 - protein, 15 aa, Artificial Sequence
  Synthetically generated peptide
  misc_feature (2)..(2): Xaa can be Cys or D-Cys
  misc_feature (6)..(6): Xaa can be Cys or D-Cys
  misc_feature (14)..(14): Xaa can be Cys or D-Cys
SXCELXCTPACTGXK

SEQ ID NO: 1364 - protein, 15 aa, Artificial Sequence
  Synthetically generated peptide
  misc_feature (2)..(2): Xaa can be Cys or D-Cys
  misc_feature (6)..(6): Xaa can be Cys or D-Cys
  misc_feature (14)..(14): Xaa can be Cys or D-Cys
SXCELXCTPACTGXY

SEQ ID NO: 1365 - protein, 14 aa, Artificial Sequence
  Synthetically generated peptide
  misc_feature (2)..(2): Xaa can be Cys or D-Cys
SXCEYCCNPACTGC

SEQ ID NO: 1366 - protein, 15 aa, Artificial Sequence
  Synthetically generated peptide
  misc_feature (2)..(2): Xaa can be Cys or D-Cys
SXCEYCCNPACTGCK

SEQ ID NO: 1367 - protein, 15 aa, Artificial Sequence
  Synthetically generated peptide
  misc_feature (2)..(2): Xaa can be Cys or D-Cys
SXCEYCCNPACTGCY

SEQ ID NO: 1368 - protein, 14 aa, Artificial Sequence
  Synthetically generated peptide
  misc_feature (2)..(2): Xaa can be Cys or D-Cys
  misc_feature (14)..(14): Xaa can be Cys or D-Cys
SXCEYCCNPACTGX

SEQ ID NO: 1369 - protein, 15 aa, Artificial Sequence
  Synthetically generated peptide
  misc_feature (2)..(2): Xaa can be Cys or D-Cys
  misc_feature (14)..(14): Xaa can be Cys or D-Cys
SXCEYCCNPACTGXK

SEQ ID NO: 1370 - protein, 15 aa, Artificial Sequence
  Synthetically generated peptide
  misc_feature (2)..(2): Xaa can be Cys or D-Cys
  misc_feature (14)..(14): Xaa can be Cys or D-Cys
SXCEYCCNPACTGXY

SEQ ID NO: 1371 - protein, 14 aa, Artificial Sequence
  Synthetically generated peptide
  misc_feature (2)..(2): Xaa can be Cys or D-Cys
SXCEYCCTPACTGC

SEQ ID NO: 1372 - protein, 15 aa, Artificial Sequence
  Synthetically generated peptide
  misc_feature (2)..(2): Xaa can be Cys or D-Cys
SXCEYCCTPACTGCK

SEQ ID NO: 1373 - protein, 15 aa, Artificial Sequence
  Synthetically generated peptide
  misc_feature (2)..(2): Xaa can be Cys or D-Cys
SXCEYCCTPACTGCY

SEQ ID NO: 1374 - protein, 14 aa, Artificial Sequence
  Synthetically generated peptide
  misc_feature (2)..(2): Xaa can be Cys or D-Cys
  misc_feature (14)..(14): Xaa can be Cys or D-Cys
SXCEYCCTPACTGX

SEQ ID NO: 1375 - protein, 15 aa, Artificial Sequence
  Synthetically generated peptide
  misc_feature (2)..(2): Xaa can be Cys or D-Cys
  misc_feature (14)..(14): Xaa can be Cys or D-Cys
SXCEYCCTPACTGXK

SEQ ID NO: 1376 - protein, 15 aa, Artificial Sequence
  Synthetically generated peptide
  misc_feature (2)..(2): Xaa can be Cys or D-Cys
  misc_feature (14)..(14): Xaa can be Cys or D-Cys
SXCEYCCTPACTGXY

SEQ ID NO: 1377 - protein, 14 aa, Artificial Sequence
  Synthetically generated peptide
  misc_feature (2)..(2): Xaa can be Cys or D-Cys
  misc_feature (6)..(6): Xaa can be Cys or D-Cys
SXCEYXCNPACTGC

SEQ ID NO: 1378 - protein, 15 aa, Artificial Sequence
  Synthetically generated peptide
  misc_feature (2)..(2): Xaa can be Cys or D-Cys
  misc_feature (6)..(6): Xaa can be Cys or D-Cys
SXCEYXCNPACTGCK

SEQ ID NO: 1379 - protein, 15 aa, Artificial Sequence
  Synthetically generated peptide
  misc_feature (2)..(2): Xaa can be Cys or D-Cys
  misc_feature (6)..(6): Xaa can be Cys or D-Cys
SXCEYXCNPACTGCY

SEQ ID NO: 1380 - protein, 14 aa, Artificial Sequence
  Synthetically generated peptide
  misc_feature (2)..(2): Xaa can be Cys or D-Cys
  misc_feature (6)..(6): Xaa can be Cys or D-Cys
  misc_feature (14)..(14): Xaa can be Cys or D-Cys
SXCEYXCNPACTGX

SEQ ID NO: 1381 - protein, 15 aa, Artificial Sequence
  Synthetically generated peptide
  misc_feature (2)..(2): Xaa can be Cys or D-Cys
  misc_feature (6)..(6): Xaa can be Cys or D-Cys
  misc_feature (14)..(14): Xaa can be Cys or D-Cys
SXCEYXCNPACTGXK

SEQ ID NO: 1382 - protein, 15 aa, Artificial Sequence
  Synthetically generated peptide
  misc_feature (2)..(2): Xaa can be Cys or D-Cys
  misc_feature (6)..(6): Xaa can be Cys or D-Cys
  misc_feature (14)..(14): Xaa can be Cys or D-Cys
SXCEYXCNPACTGXY

SEQ ID NO: 1383 - protein, 14 aa, Artificial Sequence
  Synthetically generated peptide
  misc_feature (2)..(2): Xaa can be Cys or D-Cys
  misc_feature (6)..(6): Xaa can be Cys or D-Cys
SXCEYXCTPACTGC

SEQ ID NO: 1384 - protein, 15 aa, Artificial Sequence
  Synthetically generated peptide
  misc_feature (2)..(2): Xaa can be Cys or D-Cys
  misc_feature (6)..(6): Xaa can be Cys or D-Cys
SXCEYXCTPACTGCK

SEQ ID NO: 1385 - protein, 15 aa, Artificial Sequence
  Synthetically generated peptide
  misc_feature (2)..(2): Xaa can be Cys or D-Cys
  misc_feature (6)..(6): Xaa can be Cys or D-Cys
SXCEYXCTPACTGCY

SEQ ID NO: 1386 - protein, 14 aa, Artificial Sequence
  Synthetically generated peptide
  misc_feature (2)..(2): Xaa can be Cys or D-Cys
  misc_feature (6)..(6): Xaa can be Cys or D-Cys
  misc_feature (14)..(14): Xaa can be Cys or D-Cys
SXCEYXCTPACTGX

SEQ ID NO: 1387 - protein, 15 aa, Artificial Sequence
  Synthetically generated peptide
  misc_feature (2)..(2): Xaa can be Cys or D-Cys
  misc_feature (6)..(6): Xaa can be Cys or D-Cys
  misc_feature (14)..(14): Xaa can be Cys or D-Cys
SXCEYXCTPACTGXK

SEQ ID NO: 1388 - protein, 15 aa, Artificial Sequence
  Synthetically generated peptide
  misc_feature (2)..(2): Xaa can be Cys or D-Cys
  misc_feature (6)..(6): Xaa can be Cys or D-Cys
  misc_feature (14)..(14): Xaa can be Cys or D-Cys
SXCEYXCTPACTGXY

SEQ ID NO: 1389 - protein, 14 aa, Artificial Sequence
  Synthetically generated peptide
  misc_feature (2)..(2): Xaa can be Cys or D-Cys
SXCEFCCNPACTGC

SEQ ID NO: 1390 - protein, 15 aa, Artificial Sequence
  Synthetically generated peptide
  misc_feature (2)..(2): Xaa can be Cys or D-Cys
SXCEFCCNPACTGCK

SEQ ID NO: 1391 - protein, 15 aa, Artificial Sequence
  Synthetically generated peptide
  misc_feature (2)..(2): Xaa can be Cys or D-Cys
SXCEFCCNPACTGCY

SEQ ID NO: 1392 - protein, 14 aa, Artificial Sequence
  Synthetically generated peptide
  misc_feature (2)..(2): Xaa can be Cys or D-Cys
  misc_feature (14)..(14): Xaa can be Cys or D-Cys
SXCEFCCNPACTGX

SEQ ID NO: 1393 - protein, 15 aa, Artificial Sequence
  Synthetically generated peptide
  misc_feature (2)..(2): Xaa can be Cys or D-Cys
  misc_feature (14)..(14): Xaa can be Cys or D-Cys
SXCEFCCNPACTGXK

SEQ ID NO: 1394 - protein, 15 aa, Artificial Sequence
  Synthetically generated peptide
  misc_feature (2)..(2): Xaa can be Cys or D-Cys
  misc_feature (14)..(14): Xaa can be Cys or D-Cys
SXCEFCCNPACTGXY

SEQ ID NO: 1395 - protein, 14 aa, Artificial Sequence
  Synthetically generated peptide
  misc_feature (2)..(2): Xaa can be Cys or D-Cys
SXCEFCCTPACTGC

SEQ ID NO: 1396 - protein, 15 aa, Artificial Sequence
  Synthetically generated peptide
  misc_feature (2)..(2): Xaa can be Cys or D-Cys
SXCEFCCTPACTGCK

SEQ ID NO: 1397 - protein, 15 aa, Artificial Sequence
  Synthetically generated peptide
  misc_feature (2)..(2): Xaa can be Cys or D-Cys
SXCEFCCTPACTGCY

SEQ ID NO: 1398 - protein, 14 aa, Artificial Sequence
  Synthetically generated peptide
  misc_feature (2)..(2): Xaa can be Cys or D-Cys
  misc_feature (14)..(14): Xaa can be Cys or D-Cys
SXCEFCCTPACTGX

SEQ ID NO: 1399 - protein, 15 aa, Artificial Sequence
  Synthetically generated peptide
  misc_feature (2)..(2): Xaa can be Cys or D-Cys
  misc_feature (14)..(14): Xaa can be Cys or D-Cys
SXCEFCCTPACTGXK

SEQ ID NO: 1400 - protein, 15 aa, Artificial Sequence
  Synthetically generated peptide
  misc_feature (2)..(2): Xaa can be Cys or D-Cys
  misc_feature (14)..(14): Xaa can be Cys or D-Cys
SXCEFCCTPACTGXY

SEQ ID NO: 1401 - protein, 14 aa, Artificial Sequence
  Synthetically generated peptide
  misc_feature (2)..(2): Xaa can be Cys or D-Cys
  misc_feature (6)..(6): Xaa can be Cys or D-Cys
SXCEFXCNPACTGC

SEQ ID NO: 1402 - protein, 15 aa, Artificial Sequence
  Synthetically generated peptide
  misc_feature (2)..(2): Xaa can be Cys or D-Cys
  misc_feature (6)..(6): Xaa can be Cys or D-Cys
SXCEFXCNPACTGCK

SEQ ID NO: 1403 - protein, 15 aa, Artificial Sequence
  Synthetically generated peptide
  misc_feature (2)..(2): Xaa can be Cys or D-Cys
  misc_feature (6)..(6): Xaa can be Cys or D-Cys
SXCEFXCNPACTGCY

SEQ ID NO: 1404 - protein, 14 aa, Artificial Sequence
  Synthetically generated peptide
  misc_feature (2)..(2): Xaa can be Cys or D-Cys
  misc_feature (6)..(6): Xaa can be Cys or D-Cys
  misc_feature (14)..(14): Xaa can be Cys or D-Cys
SXCEFXCNPACTGX

SEQ ID NO: 1405 - protein, 15 aa, Artificial Sequence
  Synthetically generated peptide
  misc_feature (2)..(2): Xaa can be Cys or D-Cys
  misc_feature (6)..(6): Xaa can be Cys or D-Cys
  misc_feature (14)..(14): Xaa can be Cys or D-Cys
SXCEFXCNPACTGXK

SEQ ID NO: 1406 - protein, 15 aa, Artificial Sequence
  Synthetically generated peptide
  misc_feature (2)..(2): Xaa can be Cys or D-Cys
  misc_feature (6)..(6): Xaa can be Cys or D-Cys
  misc_feature (14)..(14): Xaa can be Cys or D-Cys
SXCEFXCNPACTGXY

SEQ ID NO: 1407 - protein, 14 aa, Artificial Sequence
  Synthetically generated peptide
  misc_feature (2)..(2): Xaa can be Cys or D-Cys
  misc_feature (6)..(6): Xaa can be Cys or D-Cys
SXCEFXCTPACTGC

SEQ ID NO: 1408 - protein, 15 aa, Artificial Sequence
  Synthetically generated peptide
  misc_feature (2)..(2): Xaa can be Cys or D-Cys
  misc_feature (6)..(6): Xaa can be Cys or D-Cys
SXCEFXCTPACTGCK

SEQ ID NO: 1409 - protein, 15 aa, Artificial Sequence
  Synthetically generated peptide
  misc_feature (2)..(2): Xaa can be Cys or D-Cys
  misc_feature (6)..(6): Xaa can be Cys or D-Cys
SXCEFXCTPACTGCY

SEQ ID NO: 1410 - protein, 14 aa, Artificial Sequence
  Synthetically generated peptide
  misc_feature (2)..(2): Xaa can be Cys or D-Cys
  misc_feature (6)..(6): Xaa can be Cys or D-Cys
  misc_feature (14)..(14): Xaa can be Cys or D-Cys
SXCEFXCTPACTGX

SEQ ID NO: 1411 - protein, 15 aa, Artificial Sequence
  Synthetically generated peptide
  misc_feature (2)..(2): Xaa can be Cys or D-Cys
  misc_feature (6)..(6): Xaa can be Cys or D-Cys
  misc_feature (14)..(14): Xaa can be Cys or D-Cys
SXCEFXCTPACTGXK

SEQ ID NO: 1412 - protein, 15 aa, Artificial Sequence
  Synthetically generated peptide
  misc_feature (2)..(2): Xaa can be Cys or D-Cys
  misc_feature (6)..(6): Xaa can be Cys or D-Cys
  misc_feature (14)..(14): Xaa can be Cys or D-Cys
SXCEFXCTPACTGXY

SEQ ID NO: 1413 - protein, 14 aa, Artificial Sequence
  Synthetically generated peptide
  misc_feature (2)..(2): Xaa can be Cys or D-Cys
SXCEWCCNPACTGC

SEQ ID NO: 1414 - protein, 15 aa, Artificial Sequence
  Synthetically generated peptide
  misc_feature (2)..(2): Xaa can be Cys or D-Cys
SXCEWCCNPACTGCK

SEQ ID NO: 1415 - protein, 15 aa, Artificial Sequence
  Synthetically generated peptide
  misc_feature (2)..(2): Xaa can be Cys or D-Cys
SXCEWCCNPACTGCY

SEQ ID NO: 1416 - protein, 14 aa, Artificial Sequence
  Synthetically generated peptide
  misc_feature (2)..(2): Xaa can be Cys or D-Cys
  misc_feature (14)..(14): Xaa can be Cys or D-Cys
SXCEWCCNPACTGX

SEQ ID NO: 1417 - protein, 15 aa, Artificial Sequence
  Synthetically generated peptide
  misc_feature (2)..(2): Xaa can be Cys or D-Cys
  misc_feature (14)..(14): Xaa can be Cys or D-Cys
SXCEWCCNPACTGXK

SEQ ID NO: 1418 - protein, 15 aa, Artificial Sequence
  Synthetically generated peptide
  misc_feature (2)..(2): Xaa can be Cys or D-Cys
  misc_feature (14)..(14): Xaa can be Cys or D-Cys
SXCEWCCNPACTGXY

SEQ ID NO: 1419 - protein, 14 aa, Artificial Sequence
  Synthetically generated peptide
  misc_feature (2)..(2): Xaa can be Cys or D-Cys
SXCEWCCTPACTGC

SEQ ID NO: 1420 - protein, 15 aa, Artificial Sequence
  Synthetically generated peptide
  misc_feature (2)..(2): Xaa can be Cys or D-Cys
SXCEWCCTPACTGCK

SEQ ID NO: 1421 - protein, 15 aa, Artificial Sequence
  Synthetically generated peptide
  misc_feature (2)..(2): Xaa can be Cys or D-Cys
SXCEWCCTPACTGCY

SEQ ID NO: 1422 - protein, 14 aa, Artificial Sequence
  Synthetically generated peptide
  misc_feature (2)..(2): Xaa can be Cys or D-Cys
  misc_feature (14)..(14): Xaa can be Cys or D-Cys
SXCEWCCTPACTGX

SEQ ID NO: 1423 - protein, 15 aa, Artificial Sequence
  Synthetically generated peptide
  misc_feature (2)..(2): Xaa can be Cys or D-Cys
  misc_feature (14)..(14): Xaa can be Cys or D-Cys
SXCEWCCTPACTGXK

SEQ ID NO: 1424 - protein, 15 aa, Artificial Sequence
  Synthetically generated peptide
  misc_feature (2)..(2): Xaa can be Cys or D-Cys
  misc_feature (14)..(14): Xaa can be Cys or D-Cys
SXCEWCCTPACTGXY

SEQ ID NO: 1425 - protein, 14 aa, Artificial Sequence
  Synthetically generated peptide
  misc_feature (2)..(2): Xaa can be Cys or D-Cys
  misc_feature (6)..(6): Xaa can be Cys or D-Cys
SXCEWXCNPACTGC

SEQ ID NO: 1426 - protein, 15 aa, Artificial Sequence
  Synthetically generated peptide
  misc_feature (2)..(2): Xaa can be Cys or D-Cys
  misc_feature (6)..(6): Xaa can be Cys or D-Cys
SXCEWXCNPACTGCK

SEQ ID NO: 1427 - protein, 15 aa, Artificial Sequence
  Synthetically generated peptide
  misc_feature (2)..(2): Xaa can be Cys or D-Cys
  misc_feature (6)..(6): Xaa can be Cys or D-Cys
SXCEWXCNPACTGCY

SEQ ID NO: 1428 - protein, 14 aa, Artificial Sequence
  Synthetically generated peptide
  misc_feature (2)..(2): Xaa can be Cys or D-Cys
  misc_feature (6)..(6): Xaa can be Cys or D-Cys
  misc_feature (14)..(14): Xaa can be Cys or D-Cys
SXCEWXCNPACTGX

SEQ ID NO: 1429 - protein, 15 aa, Artificial Sequence
  Synthetically generated peptide
  misc_feature (2)..(2): Xaa can be Cys or D-Cys
  misc_feature (6)..(6): Xaa can be Cys or D-Cys
  misc_feature (14)..(14): Xaa can be Cys or D-Cys
SXCEWXCNPACTGXK

SEQ ID NO: 1430 - protein, 15 aa, Artificial Sequence
  Synthetically generated peptide
  misc_feature (2)..(2): Xaa can be Cys or D-Cys
  misc_feature (6)..(6): Xaa can be Cys or D-Cys
  misc_feature (14)..(14): Xaa can be Cys or D-Cys
SXCEWXCNPACTGXY

SEQ ID NO: 1431 - protein, 14 aa, Artificial Sequence
  Synthetically generated peptide
  misc_feature (2)..(2): Xaa can be Cys or D-Cys
  misc_feature (6)..(6): Xaa can be Cys or D-Cys
SXCEWXCTPACTGC

SEQ ID NO: 1432 - protein, 15 aa, Artificial Sequence
  Synthetically generated peptide
  misc_feature (2)..(2): Xaa can be Cys or D-Cys
  misc_feature (6)..(6): Xaa can be Cys or D-Cys
SXCEWXCTPACTGCK

SEQ ID NO: 1433 - protein, 15 aa, Artificial Sequence
  Synthetically generated peptide
  misc_feature (2)..(2): Xaa can be Cys or D-Cys
  misc_feature (6)..(6): Xaa can be Cys or D-Cys
SXCEWXCTPACTGCY

SEQ ID NO: 1434 - protein, 14 aa, Artificial Sequence
  Synthetically generated peptide
  misc_feature (2)..(2): Xaa can be Cys or D-Cys
  misc_feature (6)..(6): Xaa can be Cys or D-Cys
  misc_feature (14)..(14): Xaa can be Cys or D-Cys
SXCEWXCTPACTGX

SEQ ID NO: 1435 - protein, 15 aa, Artificial Sequence
  Synthetically generated peptide
  misc_feature (2)..(2): Xaa can be Cys or D-Cys
  misc_feature (6)..(6): Xaa can be Cys or D-Cys
  misc_feature (14)..(14): Xaa can be Cys or D-Cys
SXCEWXCTPACTGXK

SEQ ID NO: 1436 - protein, 15 aa, Artificial Sequence
  Synthetically generated peptide
  misc_feature (2)..(2): Xaa can be Cys or D-Cys
  misc_feature (6)..(6): Xaa can be Cys or D-Cys
  misc_feature (14)..(14): Xaa can be Cys or D-Cys
SXCEWXCTPACTGXY

SEQ ID NO: 1437 - protein, 14 aa, Artificial Sequence
  Synthetically generated peptide
VCCEVCCNPACTGC

SEQ ID NO: 1438 - protein, 15 aa, Artificial Sequence
  Synthetically generated peptide
VCCEVCCNPACTGCK

SEQ ID NO: 1439 - protein, 15 aa, Artificial Sequence
  Synthetically generated peptide
VCCEVCCNPACTGCY

SEQ ID NO: 1440 - protein, 14 aa, Artificial Sequence
  Synthetically generated peptide
  misc_feature (14)..(14): Xaa can be Cys or D-Cys
VCCEVCCNPACTGX

SEQ ID NO: 1441 - protein, 15 aa, Artificial Sequence
  Synthetically generated peptide
  misc_feature (14)..(14): Xaa can be Cys or D-Cys
VCCEVCCNPACTGXK

SEQ ID NO: 1442 - protein, 15 aa, Artificial Sequence
  Synthetically generated peptide
  misc_feature (14)..(14): Xaa can be Cys or D-Cys
VCCEVCCNPACTGXY

SEQ ID NO: 1443 - protein, 14 aa, Artificial Sequence
  Synthetically generated peptide
VCCEVCCTPACTGC

SEQ ID NO: 1444 - protein, 15 aa, Artificial Sequence
  Synthetically generated peptide
VCCEVCCTPACTGCK

SEQ ID NO: 1445 - protein, 15 aa, Artificial Sequence
  Synthetically generated peptide
VCCEVCCTPACTGCY

SEQ ID NO: 1446 - protein, 14 aa, Artificial Sequence
  Synthetically generated peptide
  misc_feature (14)..(14): Xaa can be Cys or D-Cys
VCCEVCCTPACTGX

SEQ ID NO: 1447 - protein, 15 aa, Artificial Sequence
  Synthetically generated peptide
  misc_feature (14)..(14): Xaa can be Cys or D-Cys
VCCEVCCTPACTGXK

SEQ ID NO: 1448 - protein, 15 aa, Artificial Sequence
  Synthetically generated peptide
  misc_feature (14)..(14): Xaa can be Cys or D-Cys
VCCEVCCTPACTGXY

SEQ ID NO: 1449 - protein, 14 aa, Artificial Sequence
  Synthetically generated peptide
  misc_feature (6)..(6): Xaa can be Cys or D-Cys
VCCEVXCNPACTGC

SEQ ID NO: 1450 - protein, 15 aa, Artificial Sequence
  Synthetically generated peptide
  misc_feature (6)..(6): Xaa can be Cys or D-Cys
VCCEVXCNPACTGCK

SEQ ID NO: 1451 - protein, 15 aa, Artificial Sequence
  Synthetically generated peptide
  misc_feature (6)..(6): Xaa can be Cys or D-Cys
VCCEVXCNPACTGCY

SEQ ID NO: 1452 - protein, 14 aa, Artificial Sequence
  Synthetically generated peptide
  misc_feature (6)..(6): Xaa can be Cys or D-Cys
  misc_feature (14)..(14): Xaa can be Cys or D-Cys
VCCEVXCNPACTGX

SEQ ID NO: 1453 - protein, 15 aa, Artificial Sequence
  Synthetically generated peptide
  misc_feature (6)..(6): Xaa can be Cys or D-Cys
  misc_feature (14)..(14): Xaa can be Cys or D-Cys
VCCEVXCNPACTGXK

SEQ ID NO: 1454 - protein, 15 aa, Artificial Sequence
  Synthetically generated peptide
  misc_feature (6)..(6): Xaa can be Cys or D-Cys
  misc_feature (14)..(14): Xaa can be Cys or D-Cys
VCCEVXCNPACTGXY

SEQ ID NO: 1455 - protein, 14 aa, Artificial Sequence
  Synthetically generated peptide
  misc_feature (6)..(6): Xaa can be Cys or D-Cys
VCCEVXCTPACTGC

SEQ ID NO: 1456 - protein, 15 aa, Artificial Sequence
  Synthetically generated peptide
  misc_feature (6)..(6): Xaa can be Cys or D-Cys
VCCEVXCTPACTGCK

SEQ ID NO: 1457 - protein, 15 aa, Artificial Sequence
  Synthetically generated peptide
  misc_feature (6)..(6): Xaa can be Cys or D-Cys
VCCEVXCTPACTGCY

SEQ ID NO: 1458 - protein, 14 aa, Artificial Sequence
  Synthetically generated peptide
  misc_feature (6)..(6): Xaa can be Cys or D-Cys
  misc_feature (14)..(14): Xaa can be Cys or D-Cys
VCCEVXCTPACTGX

SEQ ID NO: 1459 - protein, 15 aa, Artificial Sequence
  Synthetically generated peptide
  misc_feature (6)..(6): Xaa can be Cys or D-Cys
  misc_feature (14)..(14): Xaa can be Cys or D-Cys
VCCEVXCTPACTGXK

SEQ ID NO: 1460 - protein, 15 aa, Artificial Sequence
  Synthetically generated peptide
  misc_feature (6)..(6): Xaa can be Cys or D-Cys
  misc_feature (14)..(14): Xaa can be Cys or D-Cys
VCCEVXCTPACTGXY

SEQ ID NO: 1461 - protein, 14 aa, Artificial Sequence
  Synthetically generated peptide
VCCEICCNPACTGC

SEQ ID NO: 1462 - protein, 15 aa, Artificial Sequence
  Synthetically generated peptide
VCCEICCNPACTGCK

SEQ ID NO: 1463 - protein, 15 aa, Artificial Sequence
  Synthetically generated peptide
VCCEICCNPACTGCY

SEQ ID NO: 1464 - protein, 14 aa, Artificial Sequence
  Synthetically generated peptide
  misc_feature (14)..(14): Xaa can be Cys or D-Cys
VCCEICCNPACTGX

SEQ ID NO: 1465 - protein, 15 aa, Artificial Sequence
  Synthetically generated peptide
  misc_feature (14)..(14): Xaa can be Cys or D-Cys
VCCEICCNPACTGXK

SEQ ID NO: 1466 - protein, 15 aa, Artificial Sequence
  Synthetically generated peptide
  misc_feature (14)..(14): Xaa can be Cys or D-Cys
VCCEICCNPACTGXY

SEQ ID NO: 1467 - protein, 14 aa, Artificial Sequence
  Synthetically generated peptide
VCCEICCTPACTGC

SEQ ID NO: 1468 - protein, 15 aa, Artificial Sequence
  Synthetically generated peptide
VCCEICCTPACTGCK

SEQ ID NO: 1469 - protein, 15 aa, Artificial Sequence
  Synthetically generated peptide
VCCEICCTPACTGCY

SEQ ID NO: 1470 - protein, 14 aa, Artificial Sequence
  Synthetically generated peptide
  misc_feature (14)..(14): Xaa can be Cys or D-Cys
VCCEICCTPACTGX

SEQ ID NO: 1471 - protein, 15 aa, Artificial Sequence
  Synthetically generated peptide
  misc_feature (14)..(14): Xaa can be Cys or D-Cys
VCCEICCTPACTGXK

SEQ ID NO: 1472 - protein, 15 aa, Artificial Sequence
  Synthetically generated peptide
  misc_feature (14)..(14): Xaa can be Cys or D-Cys
VCCEICCTPACTGXY

SEQ ID NO: 1473 - protein, 14 aa, Artificial Sequence
  Synthetically generated peptide
  misc_feature (6)..(6): Xaa can be Cys or D-Cys
VCCEIXCNPACTGC

SEQ ID NO: 1474 - protein, 15 aa, Artificial Sequence
  Synthetically generated peptide
  misc_feature (6)..(6): Xaa can be Cys or D-Cys
VCCEIXCNPACTGCK

SEQ ID NO: 1475 - protein, 15 aa, Artificial Sequence
  Synthetically generated peptide
  misc_feature (6)..(6): Xaa can be Cys or D-Cys
VCCEIXCNPACTGCY

SEQ ID NO: 1476 - protein, 14 aa, Artificial Sequence
  Synthetically generated peptide
  misc_feature (6)..(6): Xaa can be Cys or D-Cys
  misc_feature (14)..(14): Xaa can be Cys or D-Cys
VCCEIXCNPACTGX

SEQ ID NO: 1477 - protein, 15 aa, Artificial Sequence
  Synthetically generated peptide
  misc_feature (6)..(6): Xaa can be Cys or D-Cys
  misc_feature (14)..(14): Xaa can be Cys or D-Cys
VCCEIXCNPACTGXK

SEQ ID NO: 1478 - protein, 15 aa, Artificial Sequence
  Synthetically generated peptide
  misc_feature (6)..(6): Xaa can be Cys or D-Cys
  misc_feature (14)..(14): Xaa can be Cys or D-Cys
VCCEIXCNPACTGXY

SEQ ID NO: 1479 - protein, 14 aa, Artificial Sequence
  Synthetically generated peptide
  misc_feature (6)..(6): Xaa can be Cys or D-Cys
VCCEIXCTPACTGC

SEQ ID NO: 1480 - protein, 15 aa, Artificial Sequence
  Synthetically generated peptide
  misc_feature (6)..(6): Xaa can be Cys or D-Cys
VCCEIXCTPACTGCK

SEQ ID NO: 1481 - protein, 15 aa, Artificial Sequence
  Synthetically generated peptide
  misc_feature (6)..(6): Xaa can be Cys or D-Cys
VCCEIXCTPACTGCY

SEQ ID NO: 1482 - protein, 14 aa, Artificial Sequence
  Synthetically generated peptide
  misc_feature (6)..(6): Xaa can be Cys or D-Cys
  misc_feature (14)..(14): Xaa can be Cys or D-Cys
VCCEIXCTPACTGX

SEQ ID NO: 1483 - protein, 15 aa, Artificial Sequence
  Synthetically generated peptide
  misc_feature (6)..(6): Xaa can be Cys or D-Cys
  misc_feature (14)..(14): Xaa can be Cys or D-Cys
VCCEIXCTPACTGXK

SEQ ID NO: 1484 - protein, 15 aa, Artificial Sequence
  Synthetically generated peptide
  misc_feature (6)..(6): Xaa can be Cys or D-Cys
  misc_feature (14)..(14): Xaa can be Cys or D-Cys
VCCEIXCTPACTGXY

SEQ ID NO: 1485 - protein, 14 aa, Artificial Sequence
  Synthetically generated peptide
VCCELCCNPACTGC

SEQ ID NO: 1486 - protein, 15 aa, Artificial Sequence
  Synthetically generated peptide
VCCELCCNPACTGCK

SEQ ID NO: 1487 - protein, 15 aa, Artificial Sequence
  Synthetically generated peptide
VCCELCCNPACTGCY

SEQ ID NO: 1488 - protein, 14 aa, Artificial Sequence
  Synthetically generated peptide
  misc_feature (14)..(14): Xaa can be Cys or D-Cys
VCCELCCNPACTGX

SEQ ID NO: 1489 - protein, 15 aa, Artificial Sequence
  Synthetically generated peptide
  misc_feature (14)..(14): Xaa can be Cys or D-Cys
VCCELCCNPACTGXK

SEQ ID NO: 1490 - protein, 15 aa, Artificial Sequence
  Synthetically generated peptide
  misc_feature (14)..(14): Xaa can be Cys or D-Cys
VCCELCCNPACTGXY

SEQ ID NO: 1491 - protein, 14 aa, Artificial Sequence
  Synthetically generated peptide
VCCELCCTPACTGC

SEQ ID NO: 1492 - protein, 15 aa, Artificial Sequence
  Synthetically generated peptide
VCCELCCTPACTGCK

SEQ ID NO: 1493 - protein, 15 aa, Artificial Sequence
  Synthetically generated peptide
VCCELCCTPACTGCY

SEQ ID NO: 1494 - protein, 14 aa, Artificial Sequence
  Synthetically generated peptide
  misc_feature (14)..(14): Xaa can be Cys or D-Cys
VCCELCCTPACTGX

SEQ ID NO: 1495 - protein, 15 aa, Artificial Sequence
  Synthetically generated peptide
  misc_feature (14)..(14): Xaa can be Cys or D-Cys
VCCELCCTPACTGXK

SEQ ID NO: 1496 - protein, 15 aa, Artificial Sequence
  Synthetically generated peptide
  misc_feature (14)..(14): Xaa can be Cys or D-Cys
VCCELCCTPACTGXY

SEQ ID NO: 1497 - protein, 14 aa, Artificial Sequence
  Synthetically generated peptide
  misc_feature (6)..(6): Xaa can be Cys or D-Cys
VCCELXCNPACTGC

SEQ ID NO: 1498 - protein, 15 aa, Artificial Sequence
  Synthetically generated peptide
  misc_feature (6)..(6): Xaa can be Cys or D-Cys
VCCELXCNPACTGCK

SEQ ID NO: 1499 - protein, 15 aa, Artificial Sequence
  Synthetically generated peptide
  misc_feature (6)..(6): Xaa can be Cys or D-Cys
VCCELXCNPACTGCY

SEQ ID NO: 1500 - protein, 14 aa, Artificial Sequence
  Synthetically generated peptide
  misc_feature (6)..(6): Xaa can be Cys or D-Cys
  misc_feature (14)..(14): Xaa can be Cys or D-Cys
VCCELXCNPACTGX

SEQ ID NO: 1501 - protein, 15 aa, Artificial Sequence
  Synthetically generated peptide
  misc_feature (6)..(6): Xaa can be Cys or D-Cys
  misc_feature (14)..(14): Xaa can be Cys or D-Cys
VCCELXCNPACTGXK

SEQ ID NO: 1502 - protein, 15 aa, Artificial Sequence
  Synthetically generated peptide
  misc_feature (6)..(6): Xaa can be Cys or D-Cys
  misc_feature (14)..(14): Xaa can be Cys or D-Cys
VCCELXCNPACTGXY

SEQ ID NO: 1503 - protein, 14 aa, Artificial Sequence
  Synthetically generated peptide
  misc_feature (6)..(6): Xaa can be Cys or D-Cys
VCCELXCTPACTGC

SEQ ID NO: 1504 - protein, 15 aa, Artificial Sequence
  Synthetically generated peptide
  misc_feature (6)..(6): Xaa can be Cys or D-Cys
VCCELXCTPACTGCK

SEQ ID NO: 1505 - protein, 15 aa, Artificial Sequence
  Synthetically generated peptide
  misc_feature (6)..(6): Xaa can be Cys or D-Cys
VCCELXCTPACTGCY

SEQ ID NO: 1506 - protein, 14 aa, Artificial Sequence
  Synthetically generated peptide
  misc_feature (6)..(6): Xaa can be Cys or D-Cys
  misc_feature (14)..(14): Xaa can be Cys or D-Cys
VCCELXCTPACTGX

SEQ ID NO: 1507 - protein, 15 aa, Artificial Sequence
  Synthetically generated peptide
  misc_feature (6)..(6): Xaa can be Cys or D-Cys
  misc_feature (14)..(14): Xaa can be Cys or D-Cys
VCCELXCTPACTGXK

SEQ ID NO: 1508 - protein, 15 aa, Artificial Sequence
  Synthetically generated peptide
  misc_feature (6)..(6): Xaa can be Cys or D-Cys
  misc_feature (14)..(14): Xaa can be Cys or D-Cys
VCCELXCTPACTGXY

SEQ ID NO: 1509 - protein, 14 aa, Artificial Sequence
  Synthetically generated peptide
VCCEYCCNPACTGC

SEQ ID NO: 1510 - protein, 15 aa, Artificial Sequence
  Synthetically generated peptide
VCCEYCCNPACTGCK

SEQ ID NO: 1511 - protein, 15 aa, Artificial Sequence
  Synthetically generated peptide
VCCEYCCNPACTGCY

SEQ ID NO: 1512 - protein, 14 aa, Artificial Sequence
  Synthetically generated peptide
  misc_feature (14)..(14): Xaa can be Cys or D-Cys
VCCEYCCNPACTGX

SEQ ID NO: 1513 - protein, 15 aa, Artificial Sequence
  Synthetically generated peptide
  misc_feature (14)..(14): Xaa can be Cys or D-Cys
VCCEYCCNPACTGXK

SEQ ID NO: 1514 - protein, 15 aa, Artificial Sequence
  Synthetically generated peptide
  misc_feature (14)..(14): Xaa can be Cys or D-Cys
VCCEYCCNPACTGXY

SEQ ID NO: 1515 - protein, 14 aa, Artificial Sequence
  Synthetically generated peptide
VCCEYCCTPACTGC

SEQ ID NO: 1516 - protein, 15 aa, Artificial Sequence
  Synthetically generated peptide
VCCEYCCTPACTGCK

SEQ ID NO: 1517 - protein, 15 aa, Artificial Sequence
  Synthetically generated peptide
VCCEYCCTPACTGCY

SEQ ID NO: 1518 - protein, 14 aa, Artificial Sequence
  Synthetically generated peptide
  misc_feature (14)..(14): Xaa can be Cys or D-Cys
VCCEYCCTPACTGX

SEQ ID NO: 1519 - protein, 15 aa, Artificial Sequence
  Synthetically generated peptide
  misc_feature (14)..(14): Xaa can be Cys or D-Cys
VCCEYCCTPACTGXK

SEQ ID NO: 1520 - protein, 15 aa, Artificial Sequence
  Synthetically generated peptide
  misc_feature (14)..(14): Xaa can be Cys or D-Cys
VCCEYCCTPACTGXY

SEQ ID NO: 1521 - protein, 14 aa, Artificial Sequence
  Synthetically generated peptide
  misc_feature (6)..(6): Xaa can be Cys or D-Cys
VCCEYXCNPACTGC

SEQ ID NO: 1522 - protein, 15 aa, Artificial Sequence
  Synthetically generated peptide
  misc_feature (6)..(6): Xaa can be Cys or D-Cys
VCCEYXCNPACTGCK

SEQ ID NO: 1523 - protein, 15 aa, Artificial Sequence
  Synthetically generated peptide
  misc_feature (6)..(6): Xaa can be Cys or D-Cys
VCCEYXCNPACTGCY

SEQ ID NO: 1524 - protein, 14 aa, Artificial Sequence
  Synthetically generated peptide
  misc_feature (6)..(6): Xaa can be Cys or D-Cys
  misc_feature (14)..(14): Xaa can be Cys or D-Cys
VCCEYXCNPACTGX

SEQ ID NO: 1525 - protein, 15 aa, Artificial Sequence
  Synthetically generated peptide
  misc_feature (6)..(6): Xaa can be Cys or D-Cys
  misc_feature (14)..(14): Xaa can be Cys or D-Cys
VCCEYXCNPACTGXK

SEQ ID NO: 1526 - protein, 15 aa, Artificial Sequence
  Synthetically generated peptide
  misc_feature (6)..(6): Xaa can be Cys or D-Cys
  misc_feature (14)..(14): Xaa can be Cys or D-Cys
VCCEYXCNPACTGXY

SEQ ID NO: 1527 - protein, 14 aa, Artificial Sequence
  Synthetically generated peptide
  misc_feature (6)..(6): Xaa can be Cys or D-Cys
VCCEYXCTPACTGC

SEQ ID NO: 1528 - protein, 15 aa, Artificial Sequence
  Synthetically generated peptide
  misc_feature (6)..(6): Xaa can be Cys or D-Cys
VCCEYXCTPACTGCK

SEQ ID NO: 1529 - protein, 15 aa, Artificial Sequence
  Synthetically generated peptide
  misc_feature (6)..(6): Xaa can be Cys or D-Cys
VCCEYXCTPACTGCY

SEQ ID NO: 1530 - protein, 14 aa, Artificial Sequence
  Synthetically generated peptide
  misc_feature (6)..(6): Xaa can be Cys or D-Cys
  misc_feature (14)..(14): Xaa can be Cys or D-Cys
VCCEYXCTPACTGX

SEQ ID NO: 1531 - protein, 15 aa, Artificial Sequence
  Synthetically generated peptide
  misc_feature (6)..(6): Xaa can be Cys or D-Cys
  misc_feature (14)..(14): Xaa can be Cys or D-Cys
VCCEYXCTPACTGXK

SEQ ID NO: 1532 - protein, 15 aa, Artificial Sequence
  Synthetically generated peptide
  misc_feature (6)..(6): Xaa can be Cys or D-Cys
  misc_feature (14)..(14): Xaa can be Cys or D-Cys
VCCEYXCTPACTGXY

SEQ ID NO: 1533 - protein, 14 aa, Artificial Sequence
  Synthetically generated peptide
VCCEFCCNPACTGC

SEQ ID NO: 1534 - protein, 15 aa, Artificial Sequence
  Synthetically generated peptide
VCCEFCCNPACTGCK

SEQ ID NO: 1535 - protein, 15 aa, Artificial Sequence
  Synthetically generated peptide
VCCEFCCNPACTGCY

SEQ ID NO: 1536 - protein, 14 aa, Artificial Sequence
  Synthetically generated peptide
  misc_feature (14)..(14): Xaa can be Cys or D-Cys
VCCEFCCNPACTGX

SEQ ID NO: 1537 - protein, 15 aa, Artificial Sequence
  Synthetically generated peptide
  misc_feature (14)..(14): Xaa can be Cys or D-Cys
VCCEFCCNPACTGXK

SEQ ID NO: 1538 - protein, 15 aa, Artificial Sequence
  Synthetically generated peptide
  misc_feature (14)..(14): Xaa can be Cys or D-Cys
VCCEFCCNPACTGXY

SEQ ID NO: 1539 - protein, 14 aa, Artificial Sequence
  Synthetically generated peptide
VCCEFCCTPACTGC

SEQ ID NO: 1540 - protein, 15 aa, Artificial Sequence
  Synthetically generated peptide
VCCEFCCTPACTGCK

SEQ ID NO: 1541 - protein, 15 aa, Artificial Sequence
  Synthetically generated peptide
VCCEFCCTPACTGCY

SEQ ID NO: 1542 - protein, 14 aa, Artificial Sequence
  Synthetically generated peptide
  misc_feature (14)..(14): Xaa can be Cys or D-Cys
VCCEFCCTPACTGX

SEQ ID NO: 1543 - protein, 15 aa, Artificial Sequence
  Synthetically generated peptide
  misc_feature (14)..(14): Xaa can be Cys or D-Cys
VCCEFCCTPACTGXK

SEQ ID NO: 1544 - protein, 15 aa, Artificial Sequence
  Synthetically generated peptide
  misc_feature (14)..(14): Xaa can be Cys or D-Cys
VCCEFCCTPACTGXY

SEQ ID NO: 1545 - protein, 14 aa, Artificial Sequence
  Synthetically generated peptide
  misc_feature (6)..(6): Xaa can be Cys or D-Cys
VCCEFXCNPACTGC

SEQ ID NO: 1546 - protein, 15 aa, Artificial Sequence
  Synthetically generated peptide
  misc_feature (6)..(6): Xaa can be Cys or D-Cys
VCCEFXCNPACTGCK

SEQ ID NO: 1547 - protein, 15 aa, Artificial Sequence
  Synthetically generated peptide
  misc_feature (6)..(6): Xaa can be Cys or D-Cys
VCCEFXCNPACTGCY

SEQ ID NO: 1548 - protein, 14 aa, Artificial Sequence
  Synthetically generated peptide
  misc_feature (6)..(6): Xaa can be Cys or D-Cys
  misc_feature (14)..(14): Xaa can be Cys or D-Cys
VCCEFXCNPACTGX

SEQ ID NO: 1549 - protein, 15 aa, Artificial Sequence
  Synthetically generated peptide
  misc_feature (6)..(6): Xaa can be Cys or D-Cys
  misc_feature (14)..(14): Xaa can be Cys or D-Cys
VCCEFXCNPACTGXK

SEQ ID NO: 1550 - protein, 15 aa, Artificial Sequence
  Synthetically generated peptide
  misc_feature (6)..(6): Xaa can be Cys or D-Cys
  misc_feature (14)..(14): Xaa can be Cys or D-Cys
VCCEFXCNPACTGXY

SEQ ID NO: 1551 - protein, 14 aa, Artificial Sequence
  Synthetically generated peptide
  misc_feature (6)..(6): Xaa can be Cys or D-Cys
VCCEFXCTPACTGC

SEQ ID NO: 1552 - protein, 15 aa, Artificial Sequence
  Synthetically generated peptide
  misc_feature (6)..(6): Xaa can be Cys or D-Cys
VCCEFXCTPACTGCK

SEQ ID NO: 1553 - protein, 15 aa, Artificial Sequence
  Synthetically generated peptide
  misc_feature (6)..(6): Xaa can be Cys or D-Cys
VCCEFXCTPACTGCY

SEQ ID NO: 1554 - protein, 14 aa, Artificial Sequence
  Synthetically generated peptide
  misc_feature (6)..(6): Xaa can be Cys or D-Cys
  misc_feature (14)..(14): Xaa can be Cys or D-Cys
VCCEFXCTPACTGX

SEQ ID NO: 1555 - protein, 15 aa, Artificial Sequence
  Synthetically generated peptide
  misc_feature (6)..(6): Xaa can be Cys or D-Cys
  misc_feature (14)..(14): Xaa can be Cys or D-Cys
VCCEFXCTPACTGXK

SEQ ID NO: 1556 - protein, 15 aa, Artificial Sequence
  Synthetically generated peptide
  misc_feature (6)..(6): Xaa can be Cys or D-Cys
  misc_feature (14)..(14): Xaa can be Cys or D-Cys
VCCEFXCTPACTGXY

SEQ ID NO: 1557 - protein, 14 aa, Artificial Sequence
  Synthetically generated peptide
VCCEWCCNPACTGC

SEQ ID NO: 1558 - protein, 15 aa, Artificial Sequence
  Synthetically generated peptide
VCCEWCCNPACTGCK

SEQ ID NO: 1559 - protein, 15 aa, Artificial Sequence
  Synthetically generated peptide
VCCEWCCNPACTGCY

SEQ ID NO: 1560 - protein, 14 aa, Artificial Sequence
  Synthetically generated peptide
  misc_feature (14)..(14): Xaa can be Cys or D-Cys
VCCEWCCNPACTGX

SEQ ID NO: 1561 - protein, 15 aa, Artificial Sequence
  Synthetically generated peptide
  misc_feature (14)..(14): Xaa can be Cys or D-Cys
VCCEWCCNPACTGXK

SEQ ID NO: 1562 - protein, 15 aa, Artificial Sequence
  Synthetically generated peptide
  misc_feature (14)..(14): Xaa can be Cys or D-Cys
VCCEWCCNPACTGXY

SEQ ID NO: 1563 - protein, 14 aa, Artificial Sequence
  Synthetically generated peptide
VCCEWCCTPACTGC

SEQ ID NO: 1564 - protein, 15 aa, Artificial Sequence
  Synthetically generated peptide
VCCEWCCTPACTGCK

SEQ ID NO: 1565 - protein, 15 aa, Artificial Sequence
  Synthetically generated peptide
VCCEWCCTPACTGCY

SEQ ID NO: 1566 - protein, 14 aa, Artificial Sequence
  Synthetically generated peptide
  misc_feature (14)..(14): Xaa can be Cys or D-Cys
VCCEWCCTPACTGX

SEQ ID NO: 1567 - protein, 15 aa, Artificial Sequence
  Synthetically generated peptide
  misc_feature (14)..(14): Xaa can be Cys or D-Cys
VCCEWCCTPACTGXK

SEQ ID NO: 1568 - protein, 15 aa, Artificial Sequence
  Synthetically generated peptide
  misc_feature (14)..(14): Xaa can be Cys or D-Cys
VCCEWCCTPACTGXY

SEQ ID NO: 1569 - protein, 14 aa, Artificial Sequence
  Synthetically generated peptide
  misc_feature (6)..(6): Xaa can be Cys or D-Cys
VCCEWXCNPACTGC

SEQ ID NO: 1570 - protein, 15 aa, Artificial Sequence
  Synthetically generated peptide
  misc_feature (6)..(6): Xaa can be Cys or D-Cys
VCCEWXCNPACTGCK

SEQ ID NO: 1571 - protein, 15 aa, Artificial Sequence
  Synthetically generated peptide
  misc_feature (6)..(6): Xaa can be Cys or D-Cys
VCCEWXCNPACTGCY

SEQ ID NO: 1572 - protein, 14 aa, Artificial Sequence
  Synthetically generated peptide
  misc_feature (6)..(6): Xaa can be Cys or D-Cys
  misc_feature (14)..(14): Xaa can be Cys or D-Cys
VCCEWXCNPACTGX

SEQ ID NO: 1573 - protein, 15 aa, Artificial Sequence
  Synthetically generated peptide
  misc_feature (6)..(6): Xaa can be Cys or D-Cys
  misc_feature (14)..(14): Xaa can be Cys or D-Cys
VCCEWXCNPACTGXK

SEQ ID NO: 1574 - protein, 15 aa, Artificial Sequence
  Synthetically generated peptide
  misc_feature (6)..(6): Xaa can be Cys or D-Cys
  misc_feature (14)..(14): Xaa can be Cys or D-Cys
VCCEWXCNPACTGXY

SEQ ID NO: 1575 - protein, 14 aa, Artificial Sequence
  Synthetically generated peptide
  misc_feature (6)..(6): Xaa can be Cys or D-Cys
VCCEWXCTPACTGC

SEQ ID NO: 1576 - protein, 15 aa, Artificial Sequence
  Synthetically generated peptide
  misc_feature (6)..(6): Xaa can be Cys or D-Cys
VCCEWXCTPACTGCK

SEQ ID NO: 1577 - protein, 15 aa, Artificial Sequence
  Synthetically generated peptide
  misc_feature (6)..(6): Xaa can be Cys or D-Cys
VCCEWXCTPACTGCY

SEQ ID NO: 1578 - protein, 14 aa, Artificial Sequence
  Synthetically generated peptide
  misc_feature (6)..(6): Xaa can be Cys or D-Cys
  misc_feature (14)..(14): Xaa can be Cys or D-Cys
VCCEWXCTPACTGX

SEQ ID NO: 1579 - protein, 15 aa, Artificial Sequence
  Synthetically generated peptide
  misc_feature (6)..(6): Xaa can be Cys or D-Cys
  misc_feature (14)..(14): Xaa can be Cys or D-Cys
VCCEWXCTPACTGXK

SEQ ID NO: 1580 - protein, 15 aa, Artificial Sequence
  Synthetically generated peptide
  misc_feature (6)..(6): Xaa can be Cys or D-Cys
  misc_feature (14)..(14): Xaa can be Cys or D-Cys
VCCEWXCTPACTGXY

SEQ ID NO: 1581 - protein, 14 aa, Artificial Sequence
  Synthetically generated peptide
  misc_feature (2)..(2): Xaa can be Cys or D-Cys
VXCEVCCNPACTGC

SEQ ID NO: 1582 - protein, 15 aa, Artificial Sequence
  Synthetically generated peptide
  misc_feature (2)..(2): Xaa can be Cys or D-Cys
VXCEVCCNPACTGCK

SEQ ID NO: 1583 - protein, 15 aa, Artificial Sequence
  Synthetically generated peptide
  misc_feature (2)..(2): Xaa can be Cys or D-Cys
VXCEVCCNPACTGCY

SEQ ID NO: 1584 - protein, 14 aa, Artificial Sequence
  Synthetically generated peptide
  misc_feature (2)..(2): Xaa can be Cys or D-Cys
  misc_feature (14)..(14): Xaa can be Cys or D-Cys
VXCEVCCNPACTGX

SEQ ID NO: 1585 - protein, 15 aa, Artificial Sequence
  Synthetically generated peptide
  misc_feature (2)..(2): Xaa can be Cys or D-Cys
  misc_feature (14)..(14): Xaa can be Cys or D-Cys
VXCEVCCNPACTGXK

SEQ ID NO: 1586 - protein, 15 aa, Artificial Sequence
  Synthetically generated peptide
  misc_feature (2)..(2): Xaa can be Cys or D-Cys
  misc_feature (14)..(14): Xaa can be Cys or D-Cys
VXCEVCCNPACTGXY

SEQ ID NO: 1587 - protein, 14 aa, Artificial Sequence
  Synthetically generated peptide
  misc_feature (2)..(2): Xaa can be Cys or D-Cys
VXCEVCCTPACTGC

SEQ ID NO: 1588 - protein, 15 aa, Artificial Sequence
  Synthetically generated peptide
  misc_feature (2)..(2): Xaa can be Cys or D-Cys
VXCEVCCTPACTGCK

SEQ ID NO: 1589 - protein, 15 aa, Artificial Sequence
  Synthetically generated peptide
  misc_feature (2)..(2): Xaa can be Cys or D-Cys
VXCEVCCTPACTGCY

SEQ ID NO: 1590 - protein, 14 aa, Artificial Sequence
  Synthetically generated peptide
  misc_feature (2)..(2): Xaa can be Cys or D-Cys
  misc_feature (14)..(14): Xaa can be Cys or D-Cys
VXCEVCCTPACTGX

SEQ ID NO: 1591 - protein, 15 aa, Artificial Sequence
  Synthetically generated peptide
  misc_feature (2)..(2): Xaa can be Cys or D-Cys
  misc_feature (14)..(14): Xaa can be Cys or D-Cys
VXCEVCCTPACTGXK

SEQ ID NO: 1592 - protein, 15 aa, Artificial Sequence
  Synthetically generated peptide
  misc_feature (2)..(2): Xaa can be Cys or D-Cys
  misc_feature (14)..(14): Xaa can be Cys or D-Cys
VXCEVCCTPACTGXY

SEQ ID NO: 1593 - protein, 14 aa, Artificial Sequence
  Synthetically generated peptide
  misc_feature (2)..(2): Xaa can be Cys or D-Cys
  misc_feature (6)..(6): Xaa can be Cys or D-Cys
VXCEVXCNPACTGC

SEQ ID NO: 1594 - protein, 15 aa, Artificial Sequence
  Synthetically generated peptide
  misc_feature (2)..(2): Xaa can be Cys or D-Cys
  misc_feature (6)..(6): Xaa can be Cys or D-Cys
VXCEVXCNPACTGCK

SEQ ID NO: 1595 - protein, 15 aa, Artificial Sequence
  Synthetically generated peptide
  misc_feature (2)..(2): Xaa can be Cys or D-Cys
  misc_feature (6)..(6): Xaa can be Cys or D-Cys
VXCEVXCNPACTGCY

SEQ ID NO: 1596 - protein, 14 aa, Artificial Sequence
  Synthetically generated peptide
  misc_feature (2)..(2): Xaa can be Cys or D-Cys
  misc_feature (6)..(6): Xaa can be Cys or D-Cys
  misc_feature (14)..(14): Xaa can be Cys or D-Cys
VXCEVXCNPACTGX

SEQ ID NO: 1597 - protein, 15 aa, Artificial Sequence
  Synthetically generated peptide
  misc_feature (2)..(2): Xaa can be Cys or D-Cys
  misc_feature (6)..(6): Xaa can be Cys or D-Cys
  misc_feature (14)..(14): Xaa can be Cys or D-Cys
VXCEVXCNPACTGXK

SEQ ID NO: 1598 - protein, 15 aa, Artificial Sequence
  Synthetically generated peptide
  misc_feature (2)..(2): Xaa can be Cys or D-Cys
  misc_feature (6)..(6): Xaa can be Cys or D-Cys
  misc_feature (14)..(14): Xaa can be Cys or D-Cys
VXCEVXCNPACTGXY

SEQ ID NO: 1599 - protein, 14 aa, Artificial Sequence
  Synthetically generated peptide
  misc_feature (2)..(2): Xaa can be Cys or D-Cys
  misc_feature (6)..(6): Xaa can be Cys or D-Cys
VXCEVXCTPACTGC

SEQ ID NO: 1600 - protein, 15 aa, Artificial Sequence
  Synthetically generated peptide
  misc_feature (2)..(2): Xaa can be Cys or D-Cys
  misc_feature (6)..(6): Xaa can be Cys or D-Cys
VXCEVXCTPACTGCK

SEQ ID NO: 1601 - protein, 15 aa, Artificial Sequence
  Synthetically generated peptide
  misc_feature (2)..(2): Xaa can be Cys or D-Cys
  misc_feature (6)..(6): Xaa can be Cys or D-Cys
VXCEVXCTPACTGCY

SEQ ID NO: 1602 - protein, 14 aa, Artificial Sequence
  Synthetically generated peptide
  misc_feature (2)..(2): Xaa can be Cys or D-Cys
  misc_feature (6)..(6): Xaa can be Cys or D-Cys
  misc_feature (14)..(14): Xaa can be Cys or D-Cys
VXCEVXCTPACTGX

SEQ ID NO: 1603 - protein, 15 aa, Artificial Sequence
  Synthetically generated peptide
  misc_feature (2)..(2): Xaa can be Cys or D-Cys
  misc_feature (6)..(6): Xaa can be Cys or D-Cys
  misc_feature (14)..(14): Xaa can be Cys or D-Cys
VXCEVXCTPACTGXK

SEQ ID NO: 1604 - protein, 15 aa, Artificial Sequence
  Synthetically generated peptide
  misc_feature (2)..(2): Xaa can be Cys or D-Cys
  misc_feature (6)..(6): Xaa can be Cys or D-Cys
  misc_feature (14)..(14): Xaa can be Cys or D-Cys
VXCEVXCTPACTGXY

SEQ ID NO: 1605 - protein, 14 aa, Artificial Sequence
  Synthetically generated peptide
  misc_feature (2)..(2): Xaa can be Cys or D-Cys
VXCEICCNPACTGC

SEQ ID NO: 1606 - protein, 15 aa, Artificial Sequence
  Synthetically generated peptide
  misc_feature (2)..(2): Xaa can be Cys or D-Cys
VXCEICCNPACTGCK

SEQ ID NO: 1607 - protein, 15 aa, Artificial Sequence
  Synthetically generated peptide
  misc_feature (2)..(2): Xaa can be Cys or D-Cys
VXCEICCNPACTGCY

SEQ ID NO: 1608 - protein, 14 aa, Artificial Sequence
  Synthetically generated peptide
  misc_feature (2)..(2): Xaa can be Cys or D-Cys
  misc_feature (14)..(14): Xaa can be Cys or D-Cys
VXCEICCNPACTGX

SEQ ID NO: 1609 - protein, 15 aa, Artificial Sequence
  Synthetically generated peptide
  misc_feature (2)..(2): Xaa can be Cys or D-Cys
  misc_feature (14)..(14): Xaa can be Cys or D-Cys
VXCEICCNPACTGXK

SEQ ID NO: 1610 - protein, 15 aa, Artificial Sequence
  Synthetically generated peptide
  misc_feature (2)..(2): Xaa can be Cys or D-Cys
  misc_feature (14)..(14): Xaa can be Cys or D-Cys
VXCEICCNPACTGXY

SEQ ID NO: 1611 - protein, 14 aa, Artificial Sequence
  Synthetically generated peptide
  misc_feature (2)..(2): Xaa can be Cys or D-Cys
VXCEICCTPACTGC

SEQ ID NO: 1612 - protein, 15 aa, Artificial Sequence
  Synthetically generated peptide
  misc_feature (2)..(2): Xaa can be Cys or D-Cys
VXCEICCTPACTGCK

SEQ ID NO: 1613 - protein, 15 aa, Artificial Sequence
  Synthetically generated peptide
  misc_feature (2)..(2): Xaa can be Cys or D-Cys
VXCEICCTPACTGCY

SEQ ID NO: 1614 - protein, 14 aa, Artificial Sequence
  Synthetically generated peptide
  misc_feature (2)..(2): Xaa can be Cys or D-Cys
  misc_feature (14)..(14): Xaa can be Cys or D-Cys
VXCEICCTPACTGX

SEQ ID NO: 1615 - protein, 15 aa, Artificial Sequence
  Synthetically generated peptide
  misc_feature (2)..(2): Xaa can be Cys or D-Cys
  misc_feature (14)..(14): Xaa can be Cys or D-Cys
VXCEICCTPACTGXK

SEQ ID NO: 1616 - protein, 15 aa, Artificial Sequence
  Synthetically generated peptide
  misc_feature (2)..(2): Xaa can be Cys or D-Cys
  misc_feature (14)..(14): Xaa can be Cys or D-Cys
VXCEICCTPACTGXY

SEQ ID NO: 1617 - protein, 14 aa, Artificial Sequence
  Synthetically generated peptide
  misc_feature (2)..(2): Xaa can be Cys or D-Cys
  misc_feature (6)..(6): Xaa can be Cys or D-Cys
VXCEIXCNPACTGC

SEQ ID NO: 1618 - protein, 15 aa, Artificial Sequence
  Synthetically generated peptide
  misc_feature (2)..(2): Xaa can be Cys or D-Cys
  misc_feature (6)..(6): Xaa can be Cys or D-Cys
VXCEIXCNPACTGCK

SEQ ID NO: 1619 - protein, 15 aa, Artificial Sequence
  Synthetically generated peptide
  misc_feature (2)..(2): Xaa can be Cys or D-Cys
  misc_feature (6)..(6): Xaa can be Cys or D-Cys
VXCEIXCNPACTGCY

SEQ ID NO: 1620 - protein, 14 aa, Artificial Sequence
  Synthetically generated peptide
  misc_feature (2)..(2): Xaa can be Cys or D-Cys
  misc_feature (6)..(6): Xaa can be Cys or D-Cys
  misc_feature (14)..(14): Xaa can be Cys or D-Cys
VXCEIXCNPACTGX

SEQ ID NO: 1621 - protein, 15 aa, Artificial Sequence
  Synthetically generated peptide
  misc_feature (2)..(2): Xaa can be Cys or D-Cys
  misc_feature (6)..(6): Xaa can be Cys or D-Cys
  misc_feature (14)..(14): Xaa can be Cys or D-Cys
VXCEIXCNPACTGXK

SEQ ID NO: 1622 - protein, 15 aa, Artificial Sequence
  Synthetically generated peptide
  misc_feature (2)..(2): Xaa can be Cys or D-Cys
  misc_feature (6)..(6): Xaa can be Cys or D-Cys
  misc_feature (14)..(14): Xaa can be Cys or D-Cys
VXCEIXCNPACTGXY

SEQ ID NO: 1623 - protein, 14 aa, Artificial Sequence
  Synthetically generated peptide
  misc_feature (2)..(2): Xaa can be Cys or D-Cys
  misc_feature (6)..(6): Xaa can be Cys or D-Cys
VXCEIXCTPACTGC

SEQ ID NO: 1624 - protein, 15 aa, Artificial Sequence
  Synthetically generated peptide
  misc_feature (2)..(2): Xaa can be Cys or D-Cys
  misc_feature (6)..(6): Xaa can be Cys or D-Cys
VXCEIXCTPACTGCK

SEQ ID NO: 1625 - protein, 15 aa, Artificial Sequence
  Synthetically generated peptide
  misc_feature (2)..(2): Xaa can be Cys or D-Cys
  misc_feature (6)..(6): Xaa can be Cys or D-Cys
VXCEIXCTPACTGCY

SEQ ID NO: 1626 - protein, 14 aa, Artificial Sequence
  Synthetically generated peptide
  misc_feature (2)..(2): Xaa can be Cys or D-Cys
  misc_feature (6)..(6): Xaa can be Cys or D-Cys
  misc_feature (14)..(14): Xaa can be Cys or D-Cys
VXCEIXCTPACTGX

SEQ ID NO: 1627 - protein, 15 aa, Artificial Sequence
  Synthetically generated peptide
  misc_feature (2)..(2): Xaa can be Cys or D-Cys
  misc_feature (6)..(6): Xaa can be Cys or D-Cys
  misc_feature (14)..(14): Xaa can be Cys or D-Cys
VXCEIXCTPACTGXK

SEQ ID NO: 1628 - protein, 15 aa, Artificial Sequence
  Synthetically generated peptide
  misc_feature (2)..(2): Xaa can be Cys or D-Cys
  misc_feature (6)..(6): Xaa can be Cys or D-Cys
  misc_feature (14)..(14): Xaa can be Cys or D-Cys
VXCEIXCTPACTGXY

SEQ ID NO: 1629 - protein, 14 aa, Artificial Sequence
  Synthetically generated peptide
  misc_feature (2)..(2): Xaa can be Cys or D-Cys
VXCELCCNPACTGC

SEQ ID NO: 1630 - protein, 15 aa, Artificial Sequence
  Synthetically generated peptide
  misc_feature (2)..(2): Xaa can be Cys or D-Cys
VXCELCCNPACTGCK

SEQ ID NO: 1631 - protein, 15 aa, Artificial Sequence
  Synthetically generated peptide
  misc_feature (2)..(2): Xaa can be Cys or D-Cys
VXCELCCNPACTGCY

SEQ ID NO: 1632 - protein, 14 aa, Artificial Sequence
  Synthetically generated peptide
  misc_feature (2)..(2): Xaa can be Cys or D-Cys
  misc_feature (14)..(14): Xaa can be Cys or D-Cys
VXCELCCNPACTGX

SEQ ID NO: 1633 - protein, 15 aa, Artificial Sequence
  Synthetically generated peptide
  misc_feature (2)..(2): Xaa can be Cys or D-Cys
  misc_feature (14)..(14): Xaa can be Cys or D-Cys
VXCELCCNPACTGXK

SEQ ID NO: 1634 - protein, 15 aa, Artificial Sequence
  Synthetically generated peptide
  misc_feature (2)..(2): Xaa can be Cys or D-Cys
  misc_feature (14)..(14): Xaa can be Cys or D-Cys
VXCELCCNPACTGXY

SEQ ID NO: 1635 - protein, 14 aa, Artificial Sequence
  Synthetically generated peptide
  misc_feature (2)..(2): Xaa can be Cys or D-Cys
VXCELCCTPACTGC

SEQ ID NO: 1636 - protein, 15 aa, Artificial Sequence
  Synthetically generated peptide
  misc_feature (2)..(2): Xaa can be Cys or D-Cys
VXCELCCTPACTGCK

SEQ ID NO: 1637 - protein, 15 aa, Artificial Sequence
  Synthetically generated peptide
  misc_feature (2)..(2): Xaa can be Cys or D-Cys
VXCELCCTPACTGCY

SEQ ID NO: 1638 - protein, 14 aa, Artificial Sequence
  Synthetically generated peptide
  misc_feature (2)..(2): Xaa can be Cys or D-Cys
  misc_feature (14)..(14): Xaa can be Cys or D-Cys
VXCELCCTPACTGX

SEQ ID NO: 1639 - protein, 15 aa, Artificial Sequence
  Synthetically generated peptide
  misc_feature (2)..(2): Xaa can be Cys or D-Cys
  misc_feature (14)..(14): Xaa can be Cys or D-Cys
VXCELCCTPACTGXK

SEQ ID NO: 1640 - protein, 15 aa, Artificial Sequence
  Synthetically generated peptide
  misc_feature (2)..(2): Xaa can be Cys or D-Cys
  misc_feature (14)..(14): Xaa can be Cys or D-Cys
VXCELCCTPACTGXY

SEQ ID NO: 1641 - protein, 14 aa, Artificial Sequence
  Synthetically generated peptide
  misc_feature (2)..(2): Xaa can be Cys or D-Cys
  misc_feature (6)..(6): Xaa can be Cys or D-Cys
VXCELXCNPACTGC

SEQ ID NO: 1642 - protein, 15 aa, Artificial Sequence
  Synthetically generated peptide
  misc_feature (2)..(2): Xaa can be Cys or D-Cys
  misc_feature (6)..(6): Xaa can be Cys or D-Cys
VXCELXCNPACTGCK

SEQ ID NO: 1643 - protein, 15 aa, Artificial Sequence
  Synthetically generated peptide
  misc_feature (2)..(2): Xaa can be Cys or D-Cys
  misc_feature (6)..(6): Xaa can be Cys or D-Cys
VXCELXCNPACTGCY

SEQ ID NO: 1644 - protein, 14 aa, Artificial Sequence
  Synthetically generated peptide
  misc_feature (2)..(2): Xaa can be Cys or D-Cys
  misc_feature (6)..(6): Xaa can be Cys or D-Cys
  misc_feature (14)..(14): Xaa can be Cys or D-Cys
VXCELXCNPACTGX

SEQ ID NO: 1645 - protein, 15 aa, Artificial Sequence
  Synthetically generated peptide
  misc_feature (2)..(2): Xaa can be Cys or D-Cys
  misc_feature (6)..(6): Xaa can be Cys or D-Cys
  misc_feature (14)..(14): Xaa can be Cys or D-Cys
VXCELXCNPACTGXK

SEQ ID NO: 1646 - protein, 15 aa, Artificial Sequence
  Synthetically generated peptide
  misc_feature (2)..(2): Xaa can be Cys or D-Cys
  misc_feature (6)..(6): Xaa can be Cys or D-Cys
  misc_feature (14)..(14): Xaa can be Cys or D-Cys
VXCELXCNPACTGXY

SEQ ID NO: 1647 - protein, 14 aa, Artificial Sequence
  Synthetically generated peptide
  misc_feature (2)..(2): Xaa can be Cys or D-Cys
  misc_feature (6)..(6): Xaa can be Cys or D-Cys
VXCELXCTPACTGC

SEQ ID NO: 1648 - protein, 15 aa, Artificial Sequence
  Synthetically generated peptide
  misc_feature (2)..(2): Xaa can be Cys or D-Cys
  misc_feature (6)..(6): Xaa can be Cys or D-Cys
VXCELXCTPACTGCK

SEQ ID NO: 1649 - protein, 15 aa, Artificial Sequence
  Synthetically generated peptide
  misc_feature (2)..(2): Xaa can be Cys or D-Cys
  misc_feature (6)..(6): Xaa can be Cys or D-Cys
VXCELXCTPACTGCY

SEQ ID NO: 1650 - protein, 14 aa, Artificial Sequence
  Synthetically generated peptide
  misc_feature (2)..(2): Xaa can be Cys or D-Cys
  misc_feature (6)..(6): Xaa can be Cys or D-Cys
  misc_feature (14)..(14): Xaa can be Cys or D-Cys
VXCELXCTPACTGX

SEQ ID NO: 1651 - protein, 15 aa, Artificial Sequence
  Synthetically generated peptide
  misc_feature (2)..(2): Xaa can be Cys or D-Cys
  misc_feature (6)..(6): Xaa can be Cys or D-Cys
  misc_feature (14)..(14): Xaa can be Cys or D-Cys
VXCELXCTPACTGXK

SEQ ID NO: 1652 - protein, 15 aa, Artificial Sequence
  Synthetically generated peptide
  misc_feature (2)..(2): Xaa can be Cys or D-Cys
  misc_feature (6)..(6): Xaa can be Cys or D-Cys
  misc_feature (14)..(14): Xaa can be Cys or D-Cys
VXCELXCTPACTGXY

SEQ ID NO: 1653 - protein, 14 aa, Artificial Sequence
  Synthetically generated peptide
  misc_feature (2)..(2): Xaa can be Cys or D-Cys
VXCEYCCNPACTGC

SEQ ID NO: 1654 - protein, 15 aa, Artificial Sequence
  Synthetically generated peptide
  misc_feature (2)..(2): Xaa can be Cys or D-Cys
VXCEYCCNPACTGCK

SEQ ID NO: 1655 - protein, 15 aa, Artificial Sequence
  Synthetically generated peptide
  misc_feature (2)..(2): Xaa can be Cys or D-Cys
VXCEYCCNPACTGCY

SEQ ID NO: 1656 - protein, 14 aa, Artificial Sequence
  Synthetically generated peptide
  misc_feature (2)..(2): Xaa can be Cys or D-Cys
  misc_feature (14)..(14): Xaa can be Cys or D-Cys
VXCEYCCNPACTGX

SEQ ID NO: 1657 - protein, 15 aa, Artificial Sequence
  Synthetically generated peptide
  misc_feature (2)..(2): Xaa can be Cys or D-Cys
  misc_feature (14)..(14): Xaa can be Cys or D-Cys
VXCEYCCNPACTGXK

SEQ ID NO: 1658 - protein, 15 aa, Artificial Sequence
  Synthetically generated peptide
  misc_feature (2)..(2): Xaa can be Cys or D-Cys
  misc_feature (14)..(14): Xaa can be Cys or D-Cys
VXCEYCCNPACTGXY

SEQ ID NO: 1659 - protein, 14 aa, Artificial Sequence
  Synthetically generated peptide
  misc_feature (2)..(2): Xaa can be Cys or D-Cys
VXCEYCCTPACTGC

SEQ ID NO: 1660 - protein, 15 aa, Artificial Sequence
  Synthetically generated peptide
  misc_feature (2)..(2): Xaa can be Cys or D-Cys
VXCEYCCTPACTGCK

SEQ ID NO: 1661 - protein, 15 aa, Artificial Sequence
  Synthetically generated peptide
  misc_feature (2)..(2): Xaa can be Cys or D-Cys
VXCEYCCTPACTGCY

SEQ ID NO: 1662 - protein, 14 aa, Artificial Sequence
  Synthetically generated peptide
  misc_feature (2)..(2): Xaa can be Cys or D-Cys
  misc_feature (14)..(14): Xaa can be Cys or D-Cys
VXCEYCCTPACTGX

SEQ ID NO: 1663 - protein, 15 aa, Artificial Sequence
  Synthetically generated peptide
  misc_feature (2)..(2): Xaa can be Cys or D-Cys
  misc_feature (14)..(14): Xaa can be Cys or D-Cys
VXCEYCCTPACTGXK

SEQ ID NO: 1664 - protein, 15 aa, Artificial Sequence
  Synthetically generated peptide
  misc_feature (2)..(2): Xaa can be Cys or D-Cys
  misc_feature (14)..(14): Xaa can be Cys or D-Cys
VXCEYCCTPACTGXY

SEQ ID NO: 1665 - protein, 14 aa, Artificial Sequence
  Synthetically generated peptide
  misc_feature (2)..(2): Xaa can be Cys or D-Cys
  misc_feature (6)..(6): Xaa can be Cys or D-Cys
VXCEYXCNPACTGC

SEQ ID NO: 1666 - protein, 15 aa, Artificial Sequence
  Synthetically generated peptide
  misc_feature (2)..(2): Xaa can be Cys or D-Cys
  misc_feature (6)..(6): Xaa can be Cys or D-Cys
VXCEYXCNPACTGCK

SEQ ID NO: 1667 - protein, 15 aa, Artificial Sequence
  Synthetically generated peptide
  misc_feature (2)..(2): Xaa can be Cys or D-Cys
  misc_feature (6)..(6): Xaa can be Cys or D-Cys
VXCEYXCNPACTGCY

SEQ ID NO: 1668 - protein, 14 aa, Artificial Sequence
  Synthetically generated peptide
  misc_feature (2)..(2): Xaa can be Cys or D-Cys
  misc_feature (6)..(6): Xaa can be Cys or D-Cys
  misc_feature (14)..(14): Xaa can be Cys or D-Cys
VXCEYXCNPACTGX

SEQ ID NO: 1669 - protein, 15 aa, Artificial Sequence
  Synthetically generated peptide
  misc_feature (2)..(2): Xaa can be Cys or D-Cys
  misc_feature (6)..(6): Xaa can be Cys or D-Cys
  misc_feature (14)..(14): Xaa can be Cys or D-Cys
VXCEYXCNPACTGXK

SEQ ID NO: 1670 - protein, 15 aa, Artificial Sequence
  Synthetically generated peptide
  misc_feature (2)..(2): Xaa can be Cys or D-Cys
  misc_feature (6)..(6): Xaa can be Cys or D-Cys
  misc_feature (14)..(14): Xaa can be Cys or D-Cys
VXCEYXCNPACTGXY

SEQ ID NO: 1671 - protein, 14 aa, Artificial Sequence
  Synthetically generated peptide
  misc_feature (2)..(2): Xaa can be Cys or D-Cys
  misc_feature (6)..(6): Xaa can be Cys or D-Cys
VXCEYXCTPACTGC

SEQ ID NO: 1672 - protein, 15 aa, Artificial Sequence
  Synthetically generated peptide
  misc_feature (2)..(2): Xaa can be Cys or D-Cys
  misc_feature (6)..(6): Xaa can be Cys or D-Cys
VXCEYXCTPACTGCK

SEQ ID NO: 1673 - protein, 15 aa, Artificial Sequence
  Synthetically generated peptide
  misc_feature (2)..(2): Xaa can be Cys or D-Cys
  misc_feature (6)..(6): Xaa can be Cys or D-Cys
VXCEYXCTPACTGCY

SEQ ID NO: 1674 - protein, 14 aa, Artificial Sequence
  Synthetically generated peptide
  misc_feature (2)..(2): Xaa can be Cys or D-Cys
  misc_feature (6)..(6): Xaa can be Cys or D-Cys
  misc_feature (14)..(14): Xaa can be Cys or D-Cys
VXCEYXCTPACTGX

SEQ ID NO: 1675 - protein, 15 aa, Artificial Sequence
  Synthetically generated peptide
  misc_feature (2)..(2): Xaa can be Cys or D-Cys
  misc_feature (6)..(6): Xaa can be Cys or D-Cys
  misc_feature (14)..(14): Xaa can be Cys or D-Cys
VXCEYXCTPACTGXK

SEQ ID NO: 1676 - protein, 15 aa, Artificial Sequence
  Synthetically generated peptide
  misc_feature (2)..(2): Xaa can be Cys or D-Cys
  misc_feature (6)..(6): Xaa can be Cys or D-Cys
  misc_feature (14)..(14): Xaa can be Cys or D-Cys
VXCEYXCTPACTGXY

SEQ ID NO: 1677 - protein, 14 aa, Artificial Sequence
  Synthetically generated peptide
  misc_feature (2)..(2): Xaa can be Cys or D-Cys
VXCEFCCNPACTGC

SEQ ID NO: 1678 - protein, 15 aa, Artificial Sequence
  Synthetically generated peptide
  misc_feature (2)..(2): Xaa can be Cys or D-Cys
VXCEFCCNPACTGCK

SEQ ID NO: 1679 - protein, 15 aa, Artificial Sequence
  Synthetically generated peptide
  misc_feature (2)..(2): Xaa can be Cys or D-Cys
VXCEFCCNPACTGCY

SEQ ID NO: 1680 - protein, 14 aa, Artificial Sequence
  Synthetically generated peptide
  misc_feature (2)..(2): Xaa can be Cys or D-Cys
  misc_feature (14)..(14): Xaa can be Cys or D-Cys
VXCEFCCNPACTGX

SEQ ID NO: 1681 - protein, 15 aa, Artificial Sequence
  Synthetically generated peptide
  misc_feature (2)..(2): Xaa can be Cys or D-Cys
  misc_feature (14)..(14): Xaa can be Cys or D-Cys
VXCEFCCNPACTGXK

SEQ ID NO: 1682 - protein, 15 aa, Artificial Sequence
  Synthetically generated peptide
  misc_feature (2)..(2): Xaa can be Cys or D-Cys
  misc_feature (14)..(14): Xaa can be Cys or D-Cys
VXCEFCCNPACTGXY

SEQ ID NO: 1683 - protein, 14 aa, Artificial Sequence
  Synthetically generated peptide
  misc_feature (2)..(2): Xaa can be Cys or D-Cys
VXCEFCCTPACTGC

SEQ ID NO: 1684 - protein, 15 aa, Artificial Sequence
  Synthetically generated peptide
  misc_feature (2)..(2): Xaa can be Cys or D-Cys
VXCEFCCTPACTGCK

SEQ ID NO: 1685 - protein, 15 aa, Artificial Sequence
  Synthetically generated peptide
  misc_feature (2)..(2): Xaa can be Cys or D-Cys
VXCEFCCTPACTGCY

SEQ ID NO: 1686 - protein, 14 aa, Artificial Sequence
  Synthetically generated peptide
  misc_feature (2)..(2): Xaa can be Cys or D-Cys
  misc_feature (14)..(14): Xaa can be Cys or D-Cys
VXCEFCCTPACTGX

SEQ ID NO: 1687 - protein, 15 aa, Artificial Sequence
  Synthetically generated peptide
  misc_feature (2)..(2): Xaa can be Cys or D-Cys
  misc_feature (14)..(14): Xaa can be Cys or D-Cys
VXCEFCCTPACTGXK

SEQ ID NO: 1688 - protein, 15 aa, Artificial Sequence
  Synthetically generated peptide
  misc_feature (2)..(2): Xaa can be Cys or D-Cys
  misc_feature (14)..(14): Xaa can be Cys or D-Cys
VXCEFCCTPACTGXY

SEQ ID NO: 1689 - protein, 14 aa, Artificial Sequence
  Synthetically generated peptide
  misc_feature (2)..(2): Xaa can be Cys or D-Cys
  misc_feature (6)..(6): Xaa can be Cys or D-Cys
VXCEFXCNPACTGC

SEQ ID NO: 1690 - protein, 15 aa, Artificial Sequence
  Synthetically generated peptide
  misc_feature (2)..(2): Xaa can be Cys or D-Cys
  misc_feature (6)..(6): Xaa can be Cys or D-Cys
VXCEFXCNPACTGCK

SEQ ID NO: 1691 - protein, 15 aa, Artificial Sequence
  Synthetically generated peptide
  misc_feature (2)..(2): Xaa can be Cys or D-Cys
  misc_feature (6)..(6): Xaa can be Cys or D-Cys
VXCEFXCNPACTGCY

SEQ ID NO: 1692 - protein, 14 aa, Artificial Sequence
  Synthetically generated peptide
  misc_feature (2)..(2): Xaa can be Cys or D-Cys
  misc_feature (6)..(6): Xaa can be Cys or D-Cys
  misc_feature (14)..(14): Xaa can be Cys or D-Cys
VXCEFXCNPACTGX

SEQ ID NO: 1693 - protein, 15 aa, Artificial Sequence
  Synthetically generated peptide
  misc_feature (2)..(2): Xaa can be Cys or D-Cys
  misc_feature (6)..(6): Xaa can be Cys or D-Cys
  misc_feature (14)..(14): Xaa can be Cys or D-Cys
VXCEFXCNPACTGXK

SEQ ID NO: 1694 - protein, 15 aa, Artificial Sequence
  Synthetically generated peptide
  misc_feature (2)..(2): Xaa can be Cys or D-Cys
  misc_feature (6)..(6): Xaa can be Cys or D-Cys
  misc_feature (14)..(14): Xaa can be Cys or D-Cys
VXCEFXCNPACTGXY

SEQ ID NO: 1695 - protein, 14 aa, Artificial Sequence
  Synthetically generated peptide
  misc_feature (2)..(2): Xaa can be Cys or D-Cys
  misc_feature (6)..(6): Xaa can be Cys or D-Cys
VXCEFXCTPACTGC

SEQ ID NO: 1696 - protein, 15 aa, Artificial Sequence
  Synthetically generated peptide
  misc_feature (2)..(2): Xaa can be Cys or D-Cys
  misc_feature (6)..(6): Xaa can be Cys or D-Cys
VXCEFXCTPACTGCK

SEQ ID NO: 1697 - protein, 15 aa, Artificial Sequence
  Synthetically generated peptide
  misc_feature (2)..(2): Xaa can be Cys or D-Cys
  misc_feature (6)..(6): Xaa can be Cys or D-Cys
VXCEFXCTPACTGCY

SEQ ID NO: 1698 - protein, 14 aa, Artificial Sequence
  Synthetically generated peptide
  misc_feature (2)..(2): Xaa can be Cys or D-Cys
  misc_feature (6)..(6): Xaa can be Cys or D-Cys
  misc_feature (14)..(14): Xaa can be Cys or D-Cys
VXCEFXCTPACTGX

SEQ ID NO: 1699 - protein, 15 aa, Artificial Sequence
  Synthetically generated peptide
  misc_feature (2)..(2): Xaa can be Cys or D-Cys
  misc_feature (6)..(6): Xaa can be Cys or D-Cys
  misc_feature (14)..(14): Xaa can be Cys or D-Cys
VXCEFXCTPACTGXK

SEQ ID NO: 1700 - protein, 15 aa, Artificial Sequence
  Synthetically generated peptide
  misc_feature (2)..(2): Xaa can be Cys or D-Cys
  misc_feature (6)..(6): Xaa can be Cys or D-Cys
  misc_feature (14)..(14): Xaa can be Cys or D-Cys
VXCEFXCTPACTGXY

SEQ ID NO: 1701 - protein, 14 aa, Artificial Sequence
  Synthetically generated peptide
  misc_feature (2)..(2): Xaa can be Cys or D-Cys
VXCEWCCNPACTGC

SEQ ID NO: 1702 - protein, 15 aa, Artificial Sequence
  Synthetically generated peptide
  misc_feature (2)..(2): Xaa can be Cys or D-Cys
VXCEWCCNPACTGCK

SEQ ID NO: 1703 - protein, 15 aa, Artificial Sequence
  Synthetically generated peptide
  misc_feature (2)..(2): Xaa can be Cys or D-Cys
VXCEWCCNPACTGCY

SEQ ID NO: 1704 - protein, 14 aa, Artificial Sequence
  Synthetically generated peptide
  misc_feature (2)..(2): Xaa can be Cys or D-Cys
  misc_feature (14)..(14): Xaa can be Cys or D-Cys
VXCEWCCNPACTGX

SEQ ID NO: 1705 - protein, 15 aa, Artificial Sequence
  Synthetically generated peptide
  misc_feature (2)..(2): Xaa can be Cys or D-Cys
  misc_feature (14)..(14): Xaa can be Cys or D-Cys
VXCEWCCNPACTGXK

SEQ ID NO: 1706 - protein, 15 aa, Artificial Sequence
  Synthetically generated peptide
  misc_feature (2)..(2): Xaa can be Cys or D-Cys
  misc_feature (14)..(14): Xaa can be Cys or D-Cys
VXCEWCCNPACTGXY

SEQ ID NO: 1707 - protein, 14 aa, Artificial Sequence
  Synthetically generated peptide
  misc_feature (2)..(2): Xaa can be Cys or D-Cys
VXCEWCCTPACTGC

SEQ ID NO: 1708 - protein, 15 aa, Artificial Sequence
  Synthetically generated peptide
  misc_feature (2)..(2): Xaa can be Cys or D-Cys
VXCEWCCTPACTGCK

SEQ ID NO: 1709 - protein, 15 aa, Artificial Sequence
  Synthetically generated peptide
  misc_feature (2)..(2): Xaa can be Cys or D-Cys
VXCEWCCTPACTGCY

SEQ ID NO: 1710 - protein, 14 aa, Artificial Sequence
  Synthetically generated peptide
  misc_feature (2)..(2): Xaa can be Cys or D-Cys
  misc_feature (14)..(14): Xaa can be Cys or D-Cys
VXCEWCCTPACTGX

SEQ ID NO: 1711 - protein, 15 aa, Artificial Sequence
  Synthetically generated peptide
  misc_feature (2)..(2): Xaa can be Cys or D-Cys
  misc_feature (14)..(14): Xaa can be Cys or D-Cys
VXCEWCCTPACTGXK

SEQ ID NO: 1712 - protein, 15 aa, Artificial Sequence
  Synthetically generated peptide
  misc_feature (2)..(2): Xaa can be Cys or D-Cys
  misc_feature (14)..(14): Xaa can be Cys or D-Cys
VXCEWCCTPACTGXY

SEQ ID NO: 1713 - protein, 14 aa, Artificial Sequence
  Synthetically generated peptide
  misc_feature (2)..(2): Xaa can be Cys or D-Cys
  misc_feature (6)..(6): Xaa can be Cys or D-Cys
VXCEWXCNPACTGC

SEQ ID NO: 1714 - protein, 15 aa, Artificial Sequence
  Synthetically generated peptide
  misc_feature (2)..(2): Xaa can be Cys or D-Cys
  misc_feature (6)..(6): Xaa can be Cys or D-Cys
VXCEWXCNPACTGCK

SEQ ID NO: 1715 - protein, 15 aa, Artificial Sequence
  Synthetically generated peptide
  misc_feature (2)..(2): Xaa can be Cys or D-Cys
  misc_feature (6)..(6): Xaa can be Cys or D-Cys
VXCEWXCNPACTGCY

SEQ ID NO: 1716 - protein, 14 aa, Artificial Sequence
  Synthetically generated peptide
  misc_feature (2)..(2): Xaa can be Cys or D-Cys
  misc_feature (6)..(6): Xaa can be Cys or D-Cys
  misc_feature (14)..(14): Xaa can be Cys or D-Cys
VXCEWXCNPACTGX

SEQ ID NO: 1717 - protein, 15 aa, Artificial Sequence
  Synthetically generated peptide
  misc_feature (2)..(2): Xaa can be Cys or D-Cys
  misc_feature (6)..(6): Xaa can be Cys or D-Cys
  misc_feature (14)..(14): Xaa can be Cys or D-Cys
VXCEWXCNPACTGXK

SEQ ID NO: 1718 - protein, 15 aa, Artificial Sequence
  Synthetically generated peptide
  misc_feature (2)..(2): Xaa can be Cys or D-Cys
  misc_feature (6)..(6): Xaa can be Cys or D-Cys
  misc_feature (14)..(14): Xaa can be Cys or D-Cys
VXCEWXCNPACTGXY

SEQ ID NO: 1719 - protein, 14 aa, Artificial Sequence
  Synthetically generated peptide
  misc_feature (2)..(2): Xaa can be Cys or D-Cys
  misc_feature (6)..(6): Xaa can be Cys or D-Cys
VXCEWXCTPACTGC

SEQ ID NO: 1720 - protein, 15 aa, Artificial Sequence
  Synthetically generated peptide
  misc_feature (2)..(2): Xaa can be Cys or D-Cys
  misc_feature (6)..(6): Xaa can be Cys or D-Cys
VXCEWXCTPACTGCK

SEQ ID NO: 1721 - protein, 15 aa, Artificial Sequence
  Synthetically generated peptide
  misc_feature (2)..(2): Xaa can be Cys or D-Cys
  misc_feature (6)..(6): Xaa can be Cys or D-Cys
VXCEWXCTPACTGCY

SEQ ID NO: 1722 - protein, 14 aa, Artificial Sequence
  Synthetically generated peptide
  misc_feature (2)..(2): Xaa can be Cys or D-Cys
  misc_feature (6)..(6): Xaa can be Cys or D-Cys
  misc_feature (14)..(14): Xaa can be Cys or D-Cys
VXCEWXCTPACTGX

SEQ ID NO: 1723 - protein, 15 aa, Artificial Sequence
  Synthetically generated peptide
  misc_feature (2)..(2): Xaa can be Cys or D-Cys
  misc_feature (6)..(6): Xaa can be Cys or D-Cys
  misc_feature (14)..(14): Xaa can be Cys or D-Cys
VXCEWXCTPACTGXK

SEQ ID NO: 1724 - protein, 15 aa, Artificial Sequence
  Synthetically generated peptide
  misc_feature (2)..(2): Xaa can be Cys or D-Cys
  misc_feature (6)..(6): Xaa can be Cys or D-Cys
  misc_feature (14)..(14): Xaa can be Cys or D-Cys
VXCEWXCTPACTGXY

SEQ ID NO: 1725 - protein, 14 aa, Artificial Sequence
  Synthetically generated peptide
ACCEVCCNPACTGC

SEQ ID NO: 1726 - protein, 15 aa, Artificial Sequence
  Synthetically generated peptide
ACCEVCCNPACTGCK

SEQ ID NO: 1727 - protein, 15 aa, Artificial Sequence
  Synthetically generated peptide
ACCEVCCNPACTGCY

SEQ ID NO: 1728 - protein, 14 aa, Artificial Sequence
  Synthetically generated peptide
  misc_feature (14)..(14): Xaa can be Cys or D-Cys
ACCEVCCNPACTGX

SEQ ID NO: 1729 - protein, 15 aa, Artificial Sequence
  Synthetically generated peptide
  misc_feature (14)..(14): Xaa can be Cys or D-Cys
ACCEVCCNPACTGXK

SEQ ID NO: 1730 - protein, 15 aa, Artificial Sequence
  Synthetically generated peptide
  misc_feature (14)..(14): Xaa can be Cys or D-Cys
ACCEVCCNPACTGXY

SEQ ID NO: 1731 - protein, 14 aa, Artificial Sequence
  Synthetically generated peptide
ACCEVCCTPACTGC

SEQ ID NO: 1732 - protein, 15 aa, Artificial Sequence
  Synthetically generated peptide
ACCEVCCTPACTGCK

SEQ ID NO: 1733 - protein, 15 aa, Artificial Sequence
  Synthetically generated peptide
ACCEVCCTPACTGCY

SEQ ID NO: 1734 - protein, 14 aa, Artificial Sequence
  Synthetically generated peptide
  misc_feature (14)..(14): Xaa can be Cys or D-Cys
ACCEVCCTPACTGX

SEQ ID NO: 1735 - protein, 15 aa, Artificial Sequence
  Synthetically generated peptide
  misc_feature (14)..(14): Xaa can be Cys or D-Cys
ACCEVCCTPACTGXK

SEQ ID NO: 1736 - protein, 15 aa, Artificial Sequence
  Synthetically generated peptide
  misc_feature (14)..(14): Xaa can be Cys or D-Cys
ACCEVCCTPACTGXY

SEQ ID NO: 1737 - protein, 14 aa, Artificial Sequence
  Synthetically generated peptide
  misc_feature (6)..(6): Xaa can be Cys or D-Cys
ACCEVXCNPACTGC

SEQ ID NO: 1738 - protein, 15 aa, Artificial Sequence
  Synthetically generated peptide
  misc_feature (6)..(6): Xaa can be Cys or D-Cys
ACCEVXCNPACTGCK

SEQ ID NO: 1739 - protein, 15 aa, Artificial Sequence
  Synthetically generated peptide
  misc_feature (6)..(6): Xaa can be Cys or D-Cys
ACCEVXCNPACTGCY

SEQ ID NO: 1740 - protein, 14 aa, Artificial Sequence
  Synthetically generated peptide
  misc_feature (6)..(6): Xaa can be Cys or D-Cys
  misc_feature (14)..(14): Xaa can be Cys or D-Cys
ACCEVXCNPACTGX

SEQ ID NO: 1741 - protein, 15 aa, Artificial Sequence
  Synthetically generated peptide
  misc_feature (6)..(6): Xaa can be Cys or D-Cys
  misc_feature (14)..(14): Xaa can be Cys or D-Cys
ACCEVXCNPACTGXK

SEQ ID NO: 1742 - protein, 15 aa, Artificial Sequence
  Synthetically generated peptide
  misc_feature (6)..(6): Xaa can be Cys or D-Cys
  misc_feature (14)..(14): Xaa can be Cys or D-Cys
ACCEVXCNPACTGXY

SEQ ID NO: 1743 - protein, 14 aa, Artificial Sequence
  Synthetically generated peptide
  misc_feature (6)..(6): Xaa can be Cys or D-Cys
ACCEVXCTPACTGC

SEQ ID NO: 1744 - protein, 15 aa, Artificial Sequence
  Synthetically generated peptide
  misc_feature (6)..(6): Xaa can be Cys or D-Cys
ACCEVXCTPACTGCK

SEQ ID NO: 1745 - protein, 15 aa, Artificial Sequence
  Synthetically generated peptide
  misc_feature (6)..(6): Xaa can be Cys or D-Cys
ACCEVXCTPACTGCY

SEQ ID NO: 1746 - protein, 14 aa, Artificial Sequence
  Synthetically generated peptide
  misc_feature (6)..(6): Xaa can be Cys or D-Cys
  misc_feature (14)..(14): Xaa can be Cys or D-Cys
ACCEVXCTPACTGX

SEQ ID NO: 1747 - protein, 15 aa, Artificial Sequence
  Synthetically generated peptide
  misc_feature (6)..(6): Xaa can be Cys or D-Cys
  misc_feature (14)..(14): Xaa can be Cys or D-Cys
ACCEVXCTPACTGXK

SEQ ID NO: 1748 - protein, 15 aa, Artificial Sequence
  Synthetically generated peptide
  misc_feature (6)..(6): Xaa can be Cys or D-Cys
  misc_feature (14)..(14): Xaa can be Cys or D-Cys
ACCEVXCTPACTGXY

SEQ ID NO: 1749 - protein, 14 aa, Artificial Sequence
  Synthetically generated peptide
ACCEICCNPACTGC

SEQ ID NO: 1750 - protein, 15 aa, Artificial Sequence
  Synthetically generated peptide
ACCEICCNPACTGCK

SEQ ID NO: 1751 - protein, 15 aa, Artificial Sequence
  Synthetically generated peptide
ACCEICCNPACTGCY

SEQ ID NO: 1752 - protein, 14 aa, Artificial Sequence
  Synthetically generated peptide
  misc_feature (14)..(14): Xaa can be Cys or D-Cys
ACCEICCNPACTGX

SEQ ID NO: 1753 - protein, 15 aa, Artificial Sequence
  Synthetically generated peptide
  misc_feature (14)..(14): Xaa can be Cys or D-Cys
ACCEICCNPACTGXK

SEQ ID NO: 1754 - protein, 15 aa, Artificial Sequence
  Synthetically generated peptide
  misc_feature (14)..(14): Xaa can be Cys or D-Cys
ACCEICCNPACTGXY

SEQ ID NO: 1755 - protein, 14 aa, Artificial Sequence
  Synthetically generated peptide
ACCEICCTPACTGC

SEQ ID NO: 1756 - protein, 15 aa, Artificial Sequence
  Synthetically generated peptide
ACCEICCTPACTGCK

SEQ ID NO: 1757 - protein, 15 aa, Artificial Sequence
  Synthetically generated peptide
ACCEICCTPACTGCY

SEQ ID NO: 1758 - protein, 14 aa, Artificial Sequence
  Synthetically generated peptide
  misc_feature (14)..(14): Xaa can be Cys or D-Cys
ACCEICCTPACTGX

SEQ ID NO: 1759 - protein, 15 aa, Artificial Sequence
  Synthetically generated peptide
  misc_feature (14)..(14): Xaa can be Cys or D-Cys
ACCEICCTPACTGXK

SEQ ID NO: 1760 - protein, 15 aa, Artificial Sequence
  Synthetically generated peptide
  misc_feature (14)..(14): Xaa can be Cys or D-Cys
ACCEICCTPACTGXY

SEQ ID NO: 1761 - protein, 14 aa, Artificial Sequence
  Synthetically generated peptide
  misc_feature (6)..(6): Xaa can be Cys or D-Cys
ACCEIXCNPACTGC

SEQ ID NO: 1762 - protein, 15 aa, Artificial Sequence
  Synthetically generated peptide
  misc_feature (6)..(6): Xaa can be Cys or D-Cys
ACCEIXCNPACTGCK

SEQ ID NO: 1763 - protein, 15 aa, Artificial Sequence
  Synthetically generated peptide
  misc_feature (6)..(6): Xaa can be Cys or D-Cys
ACCEIXCNPACTGCY

SEQ ID NO: 1764 - protein, 14 aa, Artificial Sequence
  Synthetically generated peptide
  misc_feature (6)..(6): Xaa can be Cys or D-Cys
  misc_feature (14)..(14): Xaa can be Cys or D-Cys
ACCEIXCNPACTGX

SEQ ID NO: 1765 - protein, 15 aa, Artificial Sequence
  Synthetically generated peptide
  misc_feature (6)..(6): Xaa can be Cys or D-Cys
  misc_feature (14)..(14): Xaa can be Cys or D-Cys
ACCEIXCNPACTGXK

SEQ ID NO: 1766 - protein, 15 aa, Artificial Sequence
  Synthetically generated peptide
  misc_feature (6)..(6): Xaa can be Cys or D-Cys
  misc_feature (14)..(14): Xaa can be Cys or D-Cys
ACCEIXCNPACTGXY

SEQ ID NO: 1767 - protein, 14 aa, Artificial Sequence
  Synthetically generated peptide
  misc_feature (6)..(6): Xaa can be Cys or D-Cys
ACCEIXCTPACTGC

SEQ ID NO: 1768 - protein, 15 aa, Artificial Sequence
  Synthetically generated peptide
  misc_feature (6)..(6): Xaa can be Cys or D-Cys
ACCEIXCTPACTGCK

SEQ ID NO: 1769 - protein, 15 aa, Artificial Sequence
  Synthetically generated peptide
  misc_feature (6)..(6): Xaa can be Cys or D-Cys
ACCEIXCTPACTGCY

SEQ ID NO: 1770 - protein, 14 aa, Artificial Sequence
  Synthetically generated peptide
  misc_feature (6)..(6): Xaa can be Cys or D-Cys
  misc_feature (14)..(14): Xaa can be Cys or D-Cys
ACCEIXCTPACTGX

SEQ ID NO: 1771 - protein, 15 aa, Artificial Sequence
  Synthetically generated peptide
  misc_feature (6)..(6): Xaa can be Cys or D-Cys
  misc_feature (14)..(14): Xaa can be Cys or D-Cys
ACCEIXCTPACTGXK

SEQ ID NO: 1772 - protein, 15 aa, Artificial Sequence
  Synthetically generated peptide
  misc_feature (6)..(6): Xaa can be Cys or D-Cys
  misc_feature (14)..(14): Xaa can be Cys or D-Cys
ACCEIXCTPACTGXY

SEQ ID NO: 1773 - protein, 14 aa, Artificial Sequence
  Synthetically generated peptide
ACCELCCNPACTGC

SEQ ID NO: 1774 - protein, 15 aa, Artificial Sequence
  Synthetically generated peptide
ACCELCCNPACTGCK

SEQ ID NO: 1775 - protein, 15 aa, Artificial Sequence
  Synthetically generated peptide
ACCELCCNPACTGCY

SEQ ID NO: 1776 - protein, 14 aa, Artificial Sequence
  Synthetically generated peptide
  misc_feature (14)..(14): Xaa can be Cys or D-Cys
ACCELCCNPACTGX

SEQ ID NO: 1777 - protein, 15 aa, Artificial Sequence
  Synthetically generated peptide
  misc_feature (14)..(14): Xaa can be Cys or D-Cys
ACCELCCNPACTGXK

SEQ ID NO: 1778 - protein, 15 aa, Artificial Sequence
  Synthetically generated peptide
  misc_feature (14)..(14): Xaa can be Cys or D-Cys
ACCELCCNPACTGXY

SEQ ID NO: 1779 - protein, 14 aa, Artificial Sequence
  Synthetically generated peptide
ACCELCCTPACTGC

SEQ ID NO: 1780 - protein, 15 aa, Artificial Sequence
  Synthetically generated peptide
ACCELCCTPACTGCK

SEQ ID NO: 1781 - protein, 15 aa, Artificial Sequence
  Synthetically generated peptide
ACCELCCTPACTGCY

SEQ ID NO: 1782 - protein, 14 aa, Artificial Sequence
  Synthetically generated peptide
  misc_feature (14)..(14): Xaa can be Cys or D-Cys
ACCELCCTPACTGX

SEQ ID NO: 1783 - protein, 15 aa, Artificial Sequence
  Synthetically generated peptide
  misc_feature (14)..(14): Xaa can be Cys or D-Cys
ACCELCCTPACTGXK

SEQ ID NO: 1784 - protein, 15 aa, Artificial Sequence
  Synthetically generated peptide
  misc_feature (14)..(14): Xaa can be Cys or D-Cys
ACCELCCTPACTGXY

SEQ ID NO: 1785 - protein, 14 aa, Artificial Sequence
  Synthetically generated peptide
  misc_feature (6)..(6): Xaa can be Cys or D-Cys
ACCELXCNPACTGC

SEQ ID NO: 1786 - protein, 15 aa, Artificial Sequence
  Synthetically generated peptide
  misc_feature (6)..(6): Xaa can be Cys or D-Cys
ACCELXCNPACTGCK

SEQ ID NO: 1787 - protein, 15 aa, Artificial Sequence
  Synthetically generated peptide
  misc_feature (6)..(6): Xaa can be Cys or D-Cys
ACCELXCNPACTGCY

SEQ ID NO: 1788 - protein, 14 aa, Artificial Sequence
  Synthetically generated peptide
  misc_feature (6)..(6): Xaa can be Cys or D-Cys
  misc_feature (14)..(14): Xaa can be Cys or D-Cys
ACCELXCNPACTGX

SEQ ID NO: 1789 - protein, 15 aa, Artificial Sequence
  Synthetically generated peptide
  misc_feature (6)..(6): Xaa can be Cys or D-Cys
  misc_feature (14)..(14): Xaa can be Cys or D-Cys
ACCELXCNPACTGXK

SEQ ID NO: 1790 - protein, 15 aa, Artificial Sequence
  Synthetically generated peptide
  misc_feature (6)..(6): Xaa can be Cys or D-Cys
  misc_feature (14)..(14): Xaa can be Cys or D-Cys
ACCELXCNPACTGXY

SEQ ID NO: 1791 - protein, 14 aa, Artificial Sequence
  Synthetically generated peptide
  misc_feature (6)..(6): Xaa can be Cys or D-Cys
ACCELXCTPACTGC

SEQ ID NO: 1792 - protein, 15 aa, Artificial Sequence
  Synthetically generated peptide
  misc_feature (6)..(6): Xaa can be Cys or D-Cys
ACCELXCTPACTGCK

SEQ ID NO: 1793 - protein, 15 aa, Artificial Sequence
  Synthetically generated peptide
  misc_feature (6)..(6): Xaa can be Cys or D-Cys
ACCELXCTPACTGCY

SEQ ID NO: 1794 - protein, 14 aa, Artificial Sequence
  Synthetically generated peptide
  misc_feature (6)..(6): Xaa can be Cys or D-Cys
  misc_feature (14)..(14): Xaa can be Cys or D-Cys
ACCELXCTPACTGX

SEQ ID NO: 1795 - protein, 15 aa, Artificial Sequence
  Synthetically generated peptide
  misc_feature (6)..(6): Xaa can be Cys or D-Cys
  misc_feature (14)..(14): Xaa can be Cys or D-Cys
ACCELXCTPACTGXK

SEQ ID NO: 1796 - protein, 15 aa, Artificial Sequence
  Synthetically generated peptide
  misc_feature (6)..(6): Xaa can be Cys or D-Cys
  misc_feature (14)..(14): Xaa can be Cys or D-Cys
ACCELXCTPACTGXY

SEQ ID NO: 1797 - protein, 14 aa, Artificial Sequence
  Synthetically generated peptide
ACCEYCCNPACTGC

SEQ ID NO: 1798 - protein, 15 aa, Artificial Sequence
  Synthetically generated peptide
ACCEYCCNPACTGCK

SEQ ID NO: 1799 - protein, 15 aa, Artificial Sequence
  Synthetically generated peptide
ACCEYCCNPACTGCY

SEQ ID NO: 1800 - protein, 14 aa, Artificial Sequence
  Synthetically generated peptide
  misc_feature (14)..(14): Xaa can be Cys or D-Cys
ACCEYCCNPACTGX

SEQ ID NO: 1801 - protein, 15 aa, Artificial Sequence
  Synthetically generated peptide
  misc_feature (14)..(14): Xaa can be Cys or D-Cys
ACCEYCCNPACTGXK

SEQ ID NO: 1802 - protein, 15 aa, Artificial Sequence
  Synthetically generated peptide
  misc_feature (14)..(14): Xaa can be Cys or D-Cys
ACCEYCCNPACTGXY

SEQ ID NO: 1803 - protein, 14 aa, Artificial Sequence
  Synthetically generated peptide
ACCEYCCTPACTGC

SEQ ID NO: 1804 - protein, 15 aa, Artificial Sequence
  Synthetically generated peptide
ACCEYCCTPACTGCK

SEQ ID NO: 1805 - protein, 15 aa, Artificial Sequence
  Synthetically generated peptide
ACCEYCCTPACTGCY

SEQ ID NO: 1806 - protein, 14 aa, Artificial Sequence
  Synthetically generated peptide
  misc_feature (14)..(14): Xaa can be Cys or D-Cys
ACCEYCCTPACTGX

SEQ ID NO: 1807 - protein, 15 aa, Artificial Sequence
  Synthetically generated peptide
  misc_feature (14)..(14): Xaa can be Cys or D-Cys
ACCEYCCTPACTGXK

SEQ ID NO: 1808 - protein, 15 aa, Artificial Sequence
  Synthetically generated peptide
  misc_feature (14)..(14): Xaa can be Cys or D-Cys
ACCEYCCTPACTGXY

SEQ ID NO: 1809 - protein, 14 aa, Artificial Sequence
  Synthetically generated peptide
  misc_feature (6)..(6): Xaa can be Cys or D-Cys
ACCEYXCNPACTGC

SEQ ID NO: 1810 - protein, 15 aa, Artificial Sequence
  Synthetically generated peptide
  misc_feature (6)..(6): Xaa can be Cys or D-Cys
ACCEYXCNPACTGCK

SEQ ID NO: 1811 - protein, 15 aa, Artificial Sequence
  Synthetically generated peptide
  misc_feature (6)..(6): Xaa can be Cys or D-Cys
ACCEYXCNPACTGCY

SEQ ID NO: 1812 - protein, 14 aa, Artificial Sequence
  Synthetically generated peptide
  misc_feature (6)..(6): Xaa can be Cys or D-Cys
  misc_feature (14)..(14): Xaa can be Cys or D-Cys
ACCEYXCNPACTGX

SEQ ID NO: 1813 - protein, 15 aa, Artificial Sequence
  Synthetically generated peptide
  misc_feature (6)..(6): Xaa can be Cys or D-Cys
  misc_feature (14)..(14): Xaa can be Cys or D-Cys
ACCEYXCNPACTGXK

SEQ ID NO: 1814 - protein, 15 aa, Artificial Sequence
  Synthetically generated peptide
  misc_feature (6)..(6): Xaa can be Cys or D-Cys
  misc_feature (14)..(14): Xaa can be Cys or D-Cys
ACCEYXCNPACTGXY

SEQ ID NO: 1815 - protein, 14 aa, Artificial Sequence
  Synthetically generated peptide
  misc_feature (6)..(6): Xaa can be Cys or D-Cys
ACCEYXCTPACTGC

SEQ ID NO: 1816 - protein, 15 aa, Artificial Sequence
  Synthetically generated peptide
  misc_feature (6)..(6): Xaa can be Cys or D-Cys
ACCEYXCTPACTGCK

SEQ ID NO: 1817 - protein, 15 aa, Artificial Sequence
  Synthetically generated peptide
  misc_feature (6)..(6): Xaa can be Cys or D-Cys
ACCEYXCTPACTGCY

SEQ ID NO: 1818 - protein, 14 aa, Artificial Sequence
  Synthetically generated peptide
  misc_feature (6)..(6): Xaa can be Cys or D-Cys
  misc_feature (14)..(14): Xaa can be Cys or D-Cys
ACCEYXCTPACTGX

SEQ ID NO: 1819 - protein, 15 aa, Artificial Sequence
  Synthetically generated peptide
  misc_feature (6)..(6): Xaa can be Cys or D-Cys
  misc_feature (14)..(14): Xaa can be Cys or D-Cys
ACCEYXCTPACTGXK

SEQ ID NO: 1820 - protein, 15 aa, Artificial Sequence
  Synthetically generated peptide
  misc_feature (6)..(6): Xaa can be Cys or D-Cys
  misc_feature (14)..(14): Xaa can be Cys or D-Cys
ACCEYXCTPACTGXY

SEQ ID NO: 1821 - protein, 14 aa, Artificial Sequence
  Synthetically generated peptide
ACCEFCCNPACTGC

SEQ ID NO: 1822 - protein, 15 aa, Artificial Sequence
  Synthetically generated peptide
ACCEFCCNPACTGCK

SEQ ID NO: 1823 - protein, 15 aa, Artificial Sequence
  Synthetically generated peptide
ACCEFCCNPACTGCY

SEQ ID NO: 1824 - protein, 14 aa, Artificial Sequence
  Synthetically generated peptide
  misc_feature (14)..(14): Xaa can be Cys or D-Cys
ACCEFCCNPACTGX

SEQ ID NO: 1825 - protein, 15 aa, Artificial Sequence
  Synthetically generated peptide
  misc_feature (14)..(14): Xaa can be Cys or D-Cys
ACCEFCCNPACTGXK

SEQ ID NO: 1826 - protein, 15 aa, Artificial Sequence
  Synthetically generated peptide
  misc_feature (14)..(14): Xaa can be Cys or D-Cys
ACCEFCCNPACTGXY

SEQ ID NO: 1827 - protein, 14 aa, Artificial Sequence
  Synthetically generated peptide
ACCEFCCTPACTGC

SEQ ID NO: 1828 - protein, 15 aa, Artificial Sequence
  Synthetically generated peptide
ACCEFCCTPACTGCK

SEQ ID NO: 1829 - protein, 15 aa, Artificial Sequence
  Synthetically generated peptide
ACCEFCCTPACTGCY

SEQ ID NO: 1830 - protein, 14 aa, Artificial Sequence
  Synthetically generated peptide
  misc_feature (14)..(14): Xaa can be Cys or D-Cys
ACCEFCCTPACTGX

SEQ ID NO: 1831 - protein, 15 aa, Artificial Sequence
  Synthetically generated peptide
  misc_feature (14)..(14): Xaa can be Cys or D-Cys
ACCEFCCTPACTGXK

SEQ ID NO: 1832 - protein, 15 aa, Artificial Sequence
  Synthetically generated peptide
  misc_feature (14)..(14): Xaa can be Cys or D-Cys
ACCEFCCTPACTGXY

SEQ ID NO: 1833 - protein, 14 aa, Artificial Sequence
  Synthetically generated peptide
  misc_feature (6)..(6): Xaa can be Cys or D-Cys
ACCEFXCNPACTGC

SEQ ID NO: 1834 - protein, 15 aa, Artificial Sequence
  Synthetically generated peptide
  misc_feature (6)..(6): Xaa can be Cys or D-Cys
ACCEFXCNPACTGCK

SEQ ID NO: 1835 - protein, 15 aa, Artificial Sequence
  Synthetically generated peptide
  misc_feature (6)..(6): Xaa can be Cys or D-Cys
ACCEFXCNPACTGCY

SEQ ID NO: 1836 - protein, 14 aa, Artificial Sequence
  Synthetically generated peptide
  misc_feature (6)..(6): Xaa can be Cys or D-Cys
  misc_feature (14)..(14): Xaa can be Cys or D-Cys
ACCEFXCNPACTGX

SEQ ID NO: 1837 - protein, 15 aa, Artificial Sequence
  Synthetically generated peptide
  misc_feature (6)..(6): Xaa can be Cys or D-Cys
  misc_feature (14)..(14): Xaa can be Cys or D-Cys
ACCEFXCNPACTGXK

SEQ ID NO: 1838 - protein, 15 aa, Artificial Sequence
  Synthetically generated peptide
  misc_feature (6)..(6): Xaa can be Cys or D-Cys
  misc_feature (14)..(14): Xaa can be Cys or D-Cys
ACCEFXCNPACTGXY

SEQ ID NO: 1839 - protein, 14 aa, Artificial Sequence
  Synthetically generated peptide
  misc_feature (6)..(6): Xaa can be Cys or D-Cys
ACCEFXCTPACTGC

SEQ ID NO: 1840 - protein, 15 aa, Artificial Sequence
  Synthetically generated peptide
  misc_feature (6)..(6): Xaa can be Cys or D-Cys
ACCEFXCTPACTGCK

SEQ ID NO: 1841 - protein, 15 aa, Artificial Sequence
  Synthetically generated peptide
  misc_feature (6)..(6): Xaa can be Cys or D-Cys
ACCEFXCTPACTGCY

SEQ ID NO: 1842 - protein, 14 aa, Artificial Sequence
  Synthetically generated peptide
  misc_feature (6)..(6): Xaa can be Cys or D-Cys
  misc_feature (14)..(14): Xaa can be Cys or D-Cys
ACCEFXCTPACTGX

SEQ ID NO: 1843 - protein, 15 aa, Artificial Sequence
  Synthetically generated peptide
  misc_feature (6)..(6): Xaa can be Cys or D-Cys
  misc_feature (14)..(14): Xaa can be Cys or D-Cys
ACCEFXCTPACTGXK

SEQ ID NO: 1844 - protein, 15 aa, Artificial Sequence
  Synthetically generated peptide
  misc_feature (6)..(6): Xaa can be Cys or D-Cys
  misc_feature (14)..(14): Xaa can be Cys or D-Cys
ACCEFXCTPACTGXY

SEQ ID NO: 1845 - protein, 14 aa, Artificial Sequence
  Synthetically generated peptide
ACCEWCCNPACTGC

SEQ ID NO: 1846 - protein, 15 aa, Artificial Sequence
  Synthetically generated peptide
ACCEWCCNPACTGCK

SEQ ID NO: 1847 - protein, 15 aa, Artificial Sequence
  Synthetically generated peptide
ACCEWCCNPACTGCY

SEQ ID NO: 1848 - protein, 14 aa, Artificial Sequence
  Synthetically generated peptide
  misc_feature (14)..(14): Xaa can be Cys or D-Cys
ACCEWCCNPACTGX

SEQ ID NO: 1849 - protein, 15 aa, Artificial Sequence
  Synthetically generated peptide
  misc_feature (14)..(14): Xaa can be Cys or D-Cys
ACCEWCCNPACTGXK

SEQ ID NO: 1850 - protein, 15 aa, Artificial Sequence
  Synthetically generated peptide
  misc_feature (14)..(14): Xaa can be Cys or D-Cys
ACCEWCCNPACTGXY

SEQ ID NO: 1851 - protein, 14 aa, Artificial Sequence
  Synthetically generated peptide
ACCEWCCTPACTGC

SEQ ID NO: 1852 - protein, 15 aa, Artificial Sequence
  Synthetically generated peptide
ACCEWCCTPACTGCK

SEQ ID NO: 1853 - protein, 15 aa, Artificial Sequence
  Synthetically generated peptide
ACCEWCCTPACTGCY

SEQ ID NO: 1854 - protein, 14 aa, Artificial Sequence
  Synthetically generated peptide
  misc_feature (14)..(14): Xaa can be Cys or D-Cys
ACCEWCCTPACTGX

SEQ ID NO: 1855 - protein, 15 aa, Artificial Sequence
  Synthetically generated peptide
  misc_feature (14)..(14): Xaa can be Cys or D-Cys
ACCEWCCTPACTGXK

SEQ ID NO: 1856 - protein, 15 aa, Artificial Sequence
  Synthetically generated peptide
  misc_feature (14)..(14): Xaa can be Cys or D-Cys
ACCEWCCTPACTGXY

SEQ ID NO: 1857 - protein, 14 aa, Artificial Sequence
  Synthetically generated peptide
  misc_feature (6)..(6): Xaa can be Cys or D-Cys
ACCEWXCNPACTGC

SEQ ID NO: 1858 - protein, 15 aa, Artificial Sequence
  Synthetically generated peptide
  misc_feature (6)..(6): Xaa can be Cys or D-Cys
ACCEWXCNPACTGCK

SEQ ID NO: 1859 - protein, 15 aa, Artificial Sequence
  Synthetically generated peptide
  misc_feature (6)..(6): Xaa can be Cys or D-Cys
ACCEWXCNPACTGCY

SEQ ID NO: 1860 - protein, 14 aa, Artificial Sequence
  Synthetically generated peptide
  misc_feature (6)..(6): Xaa can be Cys or D-Cys
  misc_feature (14)..(14): Xaa can be Cys or D-Cys
ACCEWXCNPACTGX

SEQ ID NO: 1861 - protein, 15 aa, Artificial Sequence
  Synthetically generated peptide
  misc_feature (6)..(6): Xaa can be Cys or D-Cys
  misc_feature (14)..(14): Xaa can be Cys or D-Cys
ACCEWXCNPACTGXK

SEQ ID NO: 1862 - protein, 15 aa, Artificial Sequence
  Synthetically generated peptide
  misc_feature (6)..(6): Xaa can be Cys or D-Cys
  misc_feature (14)..(14): Xaa can be Cys or D-Cys
ACCEWXCNPACTGXY

SEQ ID NO: 1863 - protein, 14 aa, Artificial Sequence
  Synthetically generated peptide
  misc_feature (6)..(6): Xaa can be Cys or D-Cys
ACCEWXCTPACTGC

SEQ ID NO: 1864 - protein, 15 aa, Artificial Sequence
  Synthetically generated peptide
  misc_feature (6)..(6): Xaa can be Cys or D-Cys
ACCEWXCTPACTGCK

SEQ ID NO: 1865 - protein, 15 aa, Artificial Sequence
  Synthetically generated peptide
  misc_feature (6)..(6): Xaa can be Cys or D-Cys
ACCEWXCTPACTGCY

SEQ ID NO: 1866 - protein, 14 aa, Artificial Sequence
  Synthetically generated peptide
  misc_feature (6)..(6): Xaa can be Cys or D-Cys
  misc_feature (14)..(14): Xaa can be Cys or D-Cys
ACCEWXCTPACTGX

SEQ ID NO: 1867 - protein, 15 aa, Artificial Sequence
  Synthetically generated peptide
  misc_feature (6)..(6): Xaa can be Cys or D-Cys
  misc_feature (14)..(14): Xaa can be Cys or D-Cys
ACCEWXCTPACTGXK

SEQ ID NO: 1868 - protein, 15 aa, Artificial Sequence
  Synthetically generated peptide
  misc_feature (6)..(6): Xaa can be Cys or D-Cys
  misc_feature (14)..(14): Xaa can be Cys or D-Cys
ACCEWXCTPACTGXY

SEQ ID NO: 1869 - protein, 14 aa, Artificial Sequence
  Synthetically generated peptide
  misc_feature (2)..(2): Xaa can be Cys or D-Cys
AXCEVCCNPACTGC

SEQ ID NO: 1870 - protein, 15 aa, Artificial Sequence
  Synthetically generated peptide
  misc_feature (2)..(2): Xaa can be Cys or D-Cys
AXCEVCCNPACTGCK

SEQ ID NO: 1871 - protein, 15 aa, Artificial Sequence
  Synthetically generated peptide
  misc_feature (2)..(2): Xaa can be Cys or D-Cys
AXCEVCCNPACTGCY

SEQ ID NO: 1872 - protein, 14 aa, Artificial Sequence
  Synthetically generated peptide
  misc_feature (2)..(2): Xaa can be Cys or D-Cys
  misc_feature (14)..(14): Xaa can be Cys or D-Cys
AXCEVCCNPACTGX

SEQ ID NO: 1873 - protein, 15 aa, Artificial Sequence
  Synthetically generated peptide
  misc_feature (2)..(2): Xaa can be Cys or D-Cys
  misc_feature (14)..(14): Xaa can be Cys or D-Cys
AXCEVCCNPACTGXK

SEQ ID NO: 1874 - protein, 15 aa, Artificial Sequence
  Synthetically generated peptide
  misc_feature (2)..(2): Xaa can be Cys or D-Cys
  misc_feature (14)..(14): Xaa can be Cys or D-Cys
AXCEVCCNPACTGXY

SEQ ID NO: 1875 - protein, 14 aa, Artificial Sequence
  Synthetically generated peptide
  misc_feature (2)..(2): Xaa can be Cys or D-Cys
AXCEVCCTPACTGC

SEQ ID NO: 1876 - protein, 15 aa, Artificial Sequence
  Synthetically generated peptide
  misc_feature (2)..(2): Xaa can be Cys or D-Cys
AXCEVCCTPACTGCK

SEQ ID NO: 1877 - protein, 15 aa, Artificial Sequence
  Synthetically generated peptide
  misc_feature (2)..(2): Xaa can be Cys or D-Cys
AXCEVCCTPACTGCY

SEQ ID NO: 1878 - protein, 14 aa, Artificial Sequence
  Synthetically generated peptide
  misc_feature (2)..(2): Xaa can be Cys or D-Cys
  misc_feature (14)..(14): Xaa can be Cys or D-Cys
AXCEVCCTPACTGX

SEQ ID NO: 1879 - protein, 15 aa, Artificial Sequence
  Synthetically generated peptide
  misc_feature (2)..(2): Xaa can be Cys or D-Cys
  misc_feature (14)..(14): Xaa can be Cys or D-Cys
AXCEVCCTPACTGXK

SEQ ID NO: 1880 - protein, 15 aa, Artificial Sequence
  Synthetically generated peptide
  misc_feature (2)..(2): Xaa can be Cys or D-Cys
  misc_feature (14)..(14): Xaa can be Cys or D-Cys
AXCEVCCTPACTGXY

SEQ ID NO: 1881 - protein, 14 aa, Artificial Sequence
  Synthetically generated peptide
  misc_feature (2)..(2): Xaa can be Cys or D-Cys
  misc_feature (6)..(6): Xaa can be Cys or D-Cys
AXCEVXCNPACTGC

SEQ ID NO: 1882 - protein, 15 aa, Artificial Sequence
  Synthetically generated peptide
  misc_feature (2)..(2): Xaa can be Cys or D-Cys
  misc_feature (6)..(6): Xaa can be Cys or D-Cys
AXCEVXCNPACTGCK

SEQ ID NO: 1883 - protein, 15 aa, Artificial Sequence
  Synthetically generated peptide
  misc_feature (2)..(2): Xaa can be Cys or D-Cys
  misc_feature (6)..(6): Xaa can be Cys or D-Cys
AXCEVXCNPACTGCY

SEQ ID NO: 1884 - protein, 14 aa, Artificial Sequence
  Synthetically generated peptide
  misc_feature (2)..(2): Xaa can be Cys or D-Cys
  misc_feature (6)..(6): Xaa can be Cys or D-Cys
  misc_feature (14)..(14): Xaa can be Cys or D-Cys
AXCEVXCNPACTGX

SEQ ID NO: 1885 - protein, 15 aa, Artificial Sequence
  Synthetically generated peptide
  misc_feature (2)..(2): Xaa can be Cys or D-Cys
  misc_feature (6)..(6): Xaa can be Cys or D-Cys
  misc_feature (14)..(14): Xaa can be Cys or D-Cys
AXCEVXCNPACTGXK

SEQ ID NO: 1886 - protein, 15 aa, Artificial Sequence
  Synthetically generated peptide
  misc_feature (2)..(2): Xaa can be Cys or D-Cys
  misc_feature (6)..(6): Xaa can be Cys or D-Cys
  misc_feature (14)..(14): Xaa can be Cys or D-Cys
AXCEVXCNPACTGXY

SEQ ID NO: 1887 - protein, 14 aa, Artificial Sequence
  Synthetically generated peptide
  misc_feature (2)..(2): Xaa can be Cys or D-Cys
  misc_feature (6)..(6): Xaa can be Cys or D-Cys
AXCEVXCTPACTGC

SEQ ID NO: 1888 - protein, 15 aa, Artificial Sequence
  Synthetically generated peptide
  misc_feature (2)..(2): Xaa can be Cys or D-Cys
  misc_feature (6)..(6): Xaa can be Cys or D-Cys
AXCEVXCTPACTGCK

SEQ ID NO: 1889 - protein, 15 aa, Artificial Sequence
  Synthetically generated peptide
  misc_feature (2)..(2): Xaa can be Cys or D-Cys
  misc_feature (6)..(6): Xaa can be Cys or D-Cys
AXCEVXCTPACTGCY

SEQ ID NO: 1890 - protein, 14 aa, Artificial Sequence
  Synthetically generated peptide
  misc_feature (2)..(2): Xaa can be Cys or D-Cys
  misc_feature (6)..(6): Xaa can be Cys or D-Cys
  misc_feature (14)..(14): Xaa can be Cys or D-Cys
AXCEVXCTPACTGX

SEQ ID NO: 1891 - protein, 15 aa, Artificial Sequence
  Synthetically generated peptide
  misc_feature (2)..(2): Xaa can be Cys or D-Cys
  misc_feature (6)..(6): Xaa can be Cys or D-Cys
  misc_feature (14)..(14): Xaa can be Cys or D-Cys
AXCEVXCTPACTGXK

SEQ ID NO: 1892 - protein, 15 aa, Artificial Sequence
  Synthetically generated peptide
  misc_feature (2)..(2): Xaa can be Cys or D-Cys
  misc_feature (6)..(6): Xaa can be Cys or D-Cys
  misc_feature (14)..(14): Xaa can be Cys or D-Cys
AXCEVXCTPACTGXY

SEQ ID NO: 1893 - protein, 14 aa, Artificial Sequence
  Synthetically generated peptide
  misc_feature (2)..(2): Xaa can be Cys or D-Cys
AXCEICCNPACTGC

SEQ ID NO: 1894 - protein, 15 aa, Artificial Sequence
  Synthetically generated peptide
  misc_feature (2)..(2): Xaa can be Cys or D-Cys
AXCEICCNPACTGCK

SEQ ID NO: 1895 - protein, 15 aa, Artificial Sequence
  Synthetically generated peptide
  misc_feature (2)..(2): Xaa can be Cys or D-Cys
AXCEICCNPACTGCY

SEQ ID NO: 1896 - protein, 14 aa, Artificial Sequence
  Synthetically generated peptide
  misc_feature (2)..(2): Xaa can be Cys or D-Cys
  misc_feature (14)..(14): Xaa can be Cys or D-Cys
AXCEICCNPACTGX

SEQ ID NO: 1897 - protein, 15 aa, Artificial Sequence
  Synthetically generated peptide
  misc_feature (2)..(2): Xaa can be Cys or D-Cys
  misc_feature (14)..(14): Xaa can be Cys or D-Cys
AXCEICCNPACTGXK

SEQ ID NO: 1898 - protein, 15 aa, Artificial Sequence
  Synthetically generated peptide
  misc_feature (2)..(2): Xaa can be Cys or D-Cys
  misc_feature (14)..(14): Xaa can be Cys or D-Cys
AXCEICCNPACTGXY

SEQ ID NO: 1899 - protein, 14 aa, Artificial Sequence
  Synthetically generated peptide
  misc_feature (2)..(2): Xaa can be Cys or D-Cys
AXCEICCTPACTGC

SEQ ID NO: 1900 - protein, 15 aa, Artificial Sequence
  Synthetically generated peptide
  misc_feature (2)..(2): Xaa can be Cys or D-Cys
AXCEICCTPACTGCK

SEQ ID NO: 1901 - protein, 15 aa, Artificial Sequence
  Synthetically generated peptide
  misc_feature (2)..(2): Xaa can be Cys or D-Cys
AXCEICCTPACTGCY

SEQ ID NO: 1902 - protein, 14 aa, Artificial Sequence
  Synthetically generated peptide
  misc_feature (2)..(2): Xaa can be Cys or D-Cys
  misc_feature (14)..(14): Xaa can be Cys or D-Cys
AXCEICCTPACTGX

SEQ ID NO: 1903 - protein, 15 aa, Artificial Sequence
  Synthetically generated peptide
  misc_feature (2)..(2): Xaa can be Cys or D-Cys
  misc_feature (14)..(14): Xaa can be Cys or D-Cys
AXCEICCTPACTGXK

SEQ ID NO: 1904 - protein, 15 aa, Artificial Sequence
  Synthetically generated peptide
  misc_feature (2)..(2): Xaa can be Cys or D-Cys
  misc_feature (14)..(14): Xaa can be Cys or D-Cys
AXCEICCTPACTGXY

SEQ ID NO: 1905 - protein, 14 aa, Artificial Sequence
  Synthetically generated peptide
  misc_feature (2)..(2): Xaa can be Cys or D-Cys
  misc_feature (6)..(6): Xaa can be Cys or D-Cys
AXCEIXCNPACTGC

SEQ ID NO: 1906 - protein, 15 aa, Artificial Sequence
  Synthetically generated peptide
  misc_feature (2)..(2): Xaa can be Cys or D-Cys
  misc_feature (6)..(6): Xaa can be Cys or D-Cys
AXCEIXCNPACTGCK

SEQ ID NO: 1907 - protein, 15 aa, Artificial Sequence
  Synthetically generated peptide
  misc_feature (2)..(2): Xaa can be Cys or D-Cys
  misc_feature (6)..(6): Xaa can be Cys or D-Cys
AXCEIXCNPACTGCY

SEQ ID NO: 1908 - protein, 14 aa, Artificial Sequence
  Synthetically generated peptide
  misc_feature (2)..(2): Xaa can be Cys or D-Cys
  misc_feature (6)..(6): Xaa can be Cys or D-Cys
  misc_feature (14)..(14): Xaa can be Cys or D-Cys
AXCEIXCNPACTGX

SEQ ID NO: 1909 - protein, 15 aa, Artificial Sequence
  Synthetically generated peptide
  misc_feature (2)..(2): Xaa can be Cys or D-Cys
  misc_feature (6)..(6): Xaa can be Cys or D-Cys
  misc_feature (14)..(14): Xaa can be Cys or D-Cys
AXCEIXCNPACTGXK

SEQ ID NO: 1910 - protein, 15 aa, Artificial Sequence
  Synthetically generated peptide
  misc_feature (2)..(2): Xaa can be Cys or D-Cys
  misc_feature (6)..(6): Xaa can be Cys or D-Cys
  misc_feature (14)..(14): Xaa can be Cys or D-Cys
AXCEIXCNPACTGXY

SEQ ID NO: 1911 - protein, 14 aa, Artificial Sequence
  Synthetically generated peptide
  misc_feature (2)..(2): Xaa can be Cys or D-Cys
  misc_feature (6)..(6): Xaa can be Cys or D-Cys
AXCEIXCTPACTGC

SEQ ID NO: 1912 - protein, 15 aa, Artificial Sequence
  Synthetically generated peptide
  misc_feature (2)..(2): Xaa can be Cys or D-Cys
  misc_feature (6)..(6): Xaa can be Cys or D-Cys
AXCEIXCTPACTGCK

SEQ ID NO: 1913 - protein, 15 aa, Artificial Sequence
  Synthetically generated peptide
  misc_feature (2)..(2): Xaa can be Cys or D-Cys
  misc_feature (6)..(6): Xaa can be Cys or D-Cys
AXCEIXCTPACTGCY

SEQ ID NO: 1914 - protein, 14 aa, Artificial Sequence
  Synthetically generated peptide
  misc_feature (2)..(2): Xaa can be Cys or D-Cys
  misc_feature (6)..(6): Xaa can be Cys or D-Cys
  misc_feature (14)..(14): Xaa can be Cys or D-Cys
AXCEIXCTPACTGX

SEQ ID NO: 1915 - protein, 15 aa, Artificial Sequence
  Synthetically generated peptide
  misc_feature (2)..(2): Xaa can be Cys or D-Cys
  misc_feature (6)..(6): Xaa can be Cys or D-Cys
  misc_feature (14)..(14): Xaa can be Cys or D-Cys
AXCEIXCTPACTGXK

SEQ ID NO: 1916 - protein, 15 aa, Artificial Sequence
  Synthetically generated peptide
  misc_feature (2)..(2): Xaa can be Cys or D-Cys
  misc_feature (6)..(6): Xaa can be Cys or D-Cys
  misc_feature (14)..(14): Xaa can be Cys or D-Cys
AXCEIXCTPACTGXY

SEQ ID NO: 1917 - protein, 14 aa, Artificial Sequence
  Synthetically generated peptide
  misc_feature (2)..(2): Xaa can be Cys or D-Cys
AXCELCCNPACTGC

SEQ ID NO: 1918 - protein, 15 aa, Artificial Sequence
  Synthetically generated peptide
  misc_feature (2)..(2): Xaa can be Cys or D-Cys
AXCELCCNPACTGCK

SEQ ID NO: 1919 - protein, 15 aa, Artificial Sequence
  Synthetically generated peptide
  misc_feature (2)..(2): Xaa can be Cys or D-Cys
AXCELCCNPACTGCY

SEQ ID NO: 1920 - protein, 14 aa, Artificial Sequence
  Synthetically generated peptide
  misc_feature (2)..(2): Xaa can be Cys or D-Cys
  misc_feature (14)..(14): Xaa can be Cys or D-Cys
AXCELCCNPACTGX

SEQ ID NO: 1921 - protein, 15 aa, Artificial Sequence
  Synthetically generated peptide
  misc_feature (2)..(2): Xaa can be Cys or D-Cys
  misc_feature (14)..(14): Xaa can be Cys or D-Cys
AXCELCCNPACTGXK

SEQ ID NO: 1922 - protein, 15 aa, Artificial Sequence
  Synthetically generated peptide
  misc_feature (2)..(2): Xaa can be Cys or D-Cys
  misc_feature (14)..(14): Xaa can be Cys or D-Cys
AXCELCCNPACTGXY

SEQ ID NO: 1923 - protein, 14 aa, Artificial Sequence
  Synthetically generated peptide
  misc_feature (2)..(2): Xaa can be Cys or D-Cys
AXCELCCTPACTGC

SEQ ID NO: 1924 - protein, 15 aa, Artificial Sequence
  Synthetically generated peptide
  misc_feature (2)..(2): Xaa can be Cys or D-Cys
AXCELCCTPACTGCK

SEQ ID NO: 1925 - protein, 15 aa, Artificial Sequence
  Synthetically generated peptide
  misc_feature (2)..(2): Xaa can be Cys or D-Cys
AXCELCCTPACTGCY

SEQ ID NO: 1926 - protein, 14 aa, Artificial Sequence
  Synthetically generated peptide
  misc_feature (2)..(2): Xaa can be Cys or D-Cys
  misc_feature (14)..(14): Xaa can be Cys or D-Cys
AXCELCCTPACTGX

SEQ ID NO: 1927 - protein, 15 aa, Artificial Sequence
  Synthetically generated peptide
  misc_feature (2)..(2): Xaa can be Cys or D-Cys
  misc_feature (14)..(14): Xaa can be Cys or D-Cys
AXCELCCTPACTGXK

SEQ ID NO: 1928 - protein, 15 aa, Artificial Sequence
  Synthetically generated peptide
  misc_feature (2)..(2): Xaa can be Cys or D-Cys
  misc_feature (14)..(14): Xaa can be Cys or D-Cys
AXCELCCTPACTGXY

SEQ ID NO: 1929 - protein, 14 aa, Artificial Sequence
  Synthetically generated peptide
  misc_feature (2)..(2): Xaa can be Cys or D-Cys
  misc_feature (6)..(6): Xaa can be Cys or D-Cys
AXCELXCNPACTGC

SEQ ID NO: 1930 - protein, 15 aa, Artificial Sequence
  Synthetically generated peptide
  misc_feature (2)..(2): Xaa can be Cys or D-Cys
  misc_feature (6)..(6): Xaa can be Cys or D-Cys
AXCELXCNPACTGCK

SEQ ID NO: 1931 - protein, 15 aa, Artificial Sequence
  Synthetically generated peptide
  misc_feature (2)..(2): Xaa can be Cys or D-Cys
  misc_feature (6)..(6): Xaa can be Cys or D-Cys
AXCELXCNPACTGCY

SEQ ID NO: 1932 - protein, 14 aa, Artificial Sequence
  Synthetically generated peptide
  misc_feature (2)..(2): Xaa can be Cys or D-Cys
  misc_feature (6)..(6): Xaa can be Cys or D-Cys
  misc_feature (14)..(14): Xaa can be Cys or D-Cys
AXCELXCNPACTGX

SEQ ID NO: 1933 - protein, 15 aa, Artificial Sequence
  Synthetically generated peptide
  misc_feature (2)..(2): Xaa can be Cys or D-Cys
  misc_feature (6)..(6): Xaa can be Cys or D-Cys
  misc_feature (14)..(14): Xaa can be Cys or D-Cys
AXCELXCNPACTGXK

SEQ ID NO: 1934 - protein, 15 aa, Artificial Sequence
  Synthetically generated peptide
  misc_feature (2)..(2): Xaa can be Cys or D-Cys
  misc_feature (6)..(6): Xaa can be Cys or D-Cys
  misc_feature (14)..(14): Xaa can be Cys or D-Cys
AXCELXCNPACTGXY

SEQ ID NO: 1935 - protein, 14 aa, Artificial Sequence
  Synthetically generated peptide
  misc_feature (2)..(2): Xaa can be Cys or D-Cys
  misc_feature (6)..(6): Xaa can be Cys or D-Cys
AXCELXCTPACTGC

SEQ ID NO: 1936 - protein, 15 aa, Artificial Sequence
  Synthetically generated peptide
  misc_feature (2)..(2): Xaa can be Cys or D-Cys
  misc_feature (6)..(6): Xaa can be Cys or D-Cys
AXCELXCTPACTGCK

SEQ ID NO: 1937 - protein, 15 aa, Artificial Sequence
  Synthetically generated peptide
  misc_feature (2)..(2): Xaa can be Cys or D-Cys
  misc_feature (6)..(6): Xaa can be Cys or D-Cys
AXCELXCTPACTGCY

SEQ ID NO: 1938 - protein, 14 aa, Artificial Sequence
  Synthetically generated peptide
  misc_feature (2)..(2): Xaa can be Cys or D-Cys
  misc_feature (6)..(6): Xaa can be Cys or D-Cys
  misc_feature (14)..(14): Xaa can be Cys or D-Cys
AXCELXCTPACTGX

SEQ ID NO: 1939 - protein, 15 aa, Artificial Sequence
  Synthetically generated peptide
  misc_feature (2)..(2): Xaa can be Cys or D-Cys
  misc_feature (6)..(6): Xaa can be Cys or D-Cys
  misc_feature (14)..(14): Xaa can be Cys or D-Cys
AXCELXCTPACTGXK

SEQ ID NO: 1940 - protein, 15 aa, Artificial Sequence
  Synthetically generated peptide
  misc_feature (2)..(2): Xaa can be Cys or D-Cys
  misc_feature (6)..(6): Xaa can be Cys or D-Cys
  misc_feature (14)..(14): Xaa can be Cys or D-Cys
AXCELXCTPACTGXY

SEQ ID NO: 1941 - protein, 14 aa, Artificial Sequence
  Synthetically generated peptide
  misc_feature (2)..(2): Xaa can be Cys or D-Cys
AXCEYCCNPACTGC

SEQ ID NO: 1942 - protein, 15 aa, Artificial Sequence
  Synthetically generated peptide
  misc_feature (2)..(2): Xaa can be Cys or D-Cys
AXCEYCCNPACTGCK

SEQ ID NO: 1943 - protein, 15 aa, Artificial Sequence
  Synthetically generated peptide
  misc_feature (2)..(2): Xaa can be Cys or D-Cys
AXCEYCCNPACTGCY

SEQ ID NO: 1944 - protein, 14 aa, Artificial Sequence
  Synthetically generated peptide
  misc_feature (2)..(2): Xaa can be Cys or D-Cys
  misc_feature (14)..(14): Xaa can be Cys or D-Cys
AXCEYCCNPACTGX

SEQ ID NO: 1945 - protein, 15 aa, Artificial Sequence
  Synthetically generated peptide
  misc_feature (2)..(2): Xaa can be Cys or D-Cys
  misc_feature (14)..(14): Xaa can be Cys or D-Cys
AXCEYCCNPACTGXK

SEQ ID NO: 1946 - protein, 15 aa, Artificial Sequence
  Synthetically generated peptide
  misc_feature (2)..(2): Xaa can be Cys or D-Cys
  misc_feature (14)..(14): Xaa can be Cys or D-Cys
AXCEYCCNPACTGXY

SEQ ID NO: 1947 - protein, 14 aa, Artificial Sequence
  Synthetically generated peptide
  misc_feature (2)..(2): Xaa can be Cys or D-Cys
AXCEYCCTPACTGC

SEQ ID NO: 1948 - protein, 15 aa, Artificial Sequence
  Synthetically generated peptide
  misc_feature (2)..(2): Xaa can be Cys or D-Cys
AXCEYCCTPACTGCK

SEQ ID NO: 1949 - protein, 15 aa, Artificial Sequence
  Synthetically generated peptide
  misc_feature (2)..(2): Xaa can be Cys or D-Cys
AXCEYCCTPACTGCY

SEQ ID NO: 1950 - protein, 14 aa, Artificial Sequence
  Synthetically generated peptide
  misc_feature (2)..(2): Xaa can be Cys or D-Cys
  misc_feature (14)..(14): Xaa can be Cys or D-Cys
AXCEYCCTPACTGX

SEQ ID NO: 1951 - protein, 15 aa, Artificial Sequence
  Synthetically generated peptide
  misc_feature (2)..(2): Xaa can be Cys or D-Cys
  misc_feature (14)..(14): Xaa can be Cys or D-Cys
AXCEYCCTPACTGXK

SEQ ID NO: 1952 - protein, 15 aa, Artificial Sequence
  Synthetically generated peptide
  misc_feature (2)..(2): Xaa can be Cys or D-Cys
  misc_feature (14)..(14): Xaa can be Cys or D-Cys
AXCEYCCTPACTGXY

SEQ ID NO: 1953 - protein, 14 aa, Artificial Sequence
  Synthetically generated peptide
  misc_feature (2)..(2): Xaa can be Cys or D-Cys
  misc_feature (6)..(6): Xaa can be Cys or D-Cys
AXCEYXCNPACTGC

SEQ ID NO: 1954 - protein, 15 aa, Artificial Sequence
  Synthetically generated peptide
  misc_feature (2)..(2): Xaa can be Cys or D-Cys
  misc_feature (6)..(6): Xaa can be Cys or D-Cys
AXCEYXCNPACTGCK

SEQ ID NO: 1955 - protein, 15 aa, Artificial Sequence
  Synthetically generated peptide
  misc_feature (2)..(2): Xaa can be Cys or D-Cys
  misc_feature (6)..(6): Xaa can be Cys or D-Cys
AXCEYXCNPACTGCY

SEQ ID NO: 1956 - protein, 14 aa, Artificial Sequence
  Synthetically generated peptide
  misc_feature (2)..(2): Xaa can be Cys or D-Cys
  misc_feature (6)..(6): Xaa can be Cys or D-Cys
  misc_feature (14)..(14): Xaa can be Cys or D-Cys
AXCEYXCNPACTGX

SEQ ID NO: 1957 - protein, 15 aa, Artificial Sequence
  Synthetically generated peptide
  misc_feature (2)..(2): Xaa can be Cys or D-Cys
  misc_feature (6)..(6): Xaa can be Cys or D-Cys
  misc_feature (14)..(14): Xaa can be Cys or D-Cys
AXCEYXCNPACTGXK

SEQ ID NO: 1958 - protein, 15 aa, Artificial Sequence
  Synthetically generated peptide
  misc_feature (2)..(2): Xaa can be Cys or D-Cys
  misc_feature (6)..(6): Xaa can be Cys or D-Cys
  misc_feature (14)..(14): Xaa can be Cys or D-Cys
AXCEYXCNPACTGXY

SEQ ID NO: 1959 - protein, 14 aa, Artificial Sequence
  Synthetically generated peptide
  misc_feature (2)..(2): Xaa can be Cys or D-Cys
  misc_feature (6)..(6): Xaa can be Cys or D-Cys
AXCEYXCTPACTGC

SEQ ID NO: 1960 - protein, 15 aa, Artificial Sequence
  Synthetically generated peptide
  misc_feature (2)..(2): Xaa can be Cys or D-Cys
  misc_feature (6)..(6): Xaa can be Cys or D-Cys
AXCEYXCTPACTGCK

SEQ ID NO: 1961 - protein, 15 aa, Artificial Sequence
  Synthetically generated peptide
  misc_feature (2)..(2): Xaa can be Cys or D-Cys
  misc_feature (6)..(6): Xaa can be Cys or D-Cys
AXCEYXCTPACTGCY

SEQ ID NO: 1962 - protein, 14 aa, Artificial Sequence
  Synthetically generated peptide
  misc_feature (2)..(2): Xaa can be Cys or D-Cys
  misc_feature (6)..(6): Xaa can be Cys or D-Cys
  misc_feature (14)..(14): Xaa can be Cys or D-Cys
AXCEYXCTPACTGX

SEQ ID NO: 1963 - protein, 15 aa, Artificial Sequence
  Synthetically generated peptide
  misc_feature (2)..(2): Xaa can be Cys or D-Cys
  misc_feature (6)..(6): Xaa can be Cys or D-Cys
  misc_feature (14)..(14): Xaa can be Cys or D-Cys
AXCEYXCTPACTGXK

SEQ ID NO: 1964 - protein, 15 aa, Artificial Sequence
  Synthetically generated peptide
  misc_feature (2)..(2): Xaa can be Cys or D-Cys
  misc_feature (6)..(6): Xaa can be Cys or D-Cys
  misc_feature (14)..(14): Xaa can be Cys or D-Cys
AXCEYXCTPACTGXY

SEQ ID NO: 1965 - protein, 14 aa, Artificial Sequence
  Synthetically generated peptide
  misc_feature (2)..(2): Xaa can be Cys or D-Cys
AXCEFCCNPACTGC

SEQ ID NO: 1966 - protein, 15 aa, Artificial Sequence
  Synthetically generated peptide
  misc_feature (2)..(2): Xaa can be Cys or D-Cys
AXCEFCCNPACTGCK

SEQ ID NO: 1967 - protein, 15 aa, Artificial Sequence
  Synthetically generated peptide
  misc_feature (2)..(2): Xaa can be Cys or D-Cys
AXCEFCCNPACTGCY

SEQ ID NO: 1968 - protein, 14 aa, Artificial Sequence
  Synthetically generated peptide
  misc_feature (2)..(2): Xaa can be Cys or D-Cys
  misc_feature (14)..(14): Xaa can be Cys or D-Cys
AXCEFCCNPACTGX

SEQ ID NO: 1969 - protein, 15 aa, Artificial Sequence
  Synthetically generated peptide
  misc_feature (2)..(2): Xaa can be Cys or D-Cys
  misc_feature (14)..(14): Xaa can be Cys or D-Cys
AXCEFCCNPACTGXK

SEQ ID NO: 1970 - protein, 15 aa, Artificial Sequence
  Synthetically generated peptide
  misc_feature (2)..(2): Xaa can be Cys or D-Cys
  misc_feature (14)..(14): Xaa can be Cys or D-Cys
AXCEFCCNPACTGXY

SEQ ID NO: 1971 - protein, 14 aa, Artificial Sequence
  Synthetically generated peptide
  misc_feature (2)..(2): Xaa can be Cys or D-Cys
AXCEFCCTPACTGC

SEQ ID NO: 1972 - protein, 15 aa, Artificial Sequence
  Synthetically generated peptide
  misc_feature (2)..(2): Xaa can be Cys or D-Cys
AXCEFCCTPACTGCK

SEQ ID NO: 1973 - protein, 15 aa, Artificial Sequence
  Synthetically generated peptide
  misc_feature (2)..(2): Xaa can be Cys or D-Cys
AXCEFCCTPACTGCY

SEQ ID NO: 1974 - protein, 14 aa, Artificial Sequence
  Synthetically generated peptide
  misc_feature (2)..(2): Xaa can be Cys or D-Cys
  misc_feature (14)..(14): Xaa can be Cys or D-Cys
AXCEFCCTPACTGX

SEQ ID NO: 1975 - protein, 15 aa, Artificial Sequence
  Synthetically generated peptide
  misc_feature (2)..(2): Xaa can be Cys or D-Cys
  misc_feature (14)..(14): Xaa can be Cys or D-Cys
AXCEFCCTPACTGXK

SEQ ID NO: 1976 - protein, 15 aa, Artificial Sequence
  Synthetically generated peptide
  misc_feature (2)..(2): Xaa can be Cys or D-Cys
  misc_feature (14)..(14): Xaa can be Cys or D-Cys
AXCEFCCTPACTGXY

SEQ ID NO: 1977 - protein, 14 aa, Artificial Sequence
  Synthetically generated peptide
  misc_feature (2)..(2): Xaa can be Cys or D-Cys
  misc_feature (6)..(6): Xaa can be Cys or D-Cys
AXCEFXCNPACTGC

SEQ ID NO: 1978 - protein, 15 aa, Artificial Sequence
  Synthetically generated peptide
  misc_feature (2)..(2): Xaa can be Cys or D-Cys
  misc_feature (6)..(6): Xaa can be Cys or D-Cys
AXCEFXCNPACTGCK

SEQ ID NO: 1979 - protein, 15 aa, Artificial Sequence
  Synthetically generated peptide
  misc_feature (2)..(2): Xaa can be Cys or D-Cys
  misc_feature (6)..(6): Xaa can be Cys or D-Cys
AXCEFXCNPACTGCY

SEQ ID NO: 1980 - protein, 14 aa, Artificial Sequence
  Synthetically generated peptide
  misc_feature (2)..(2): Xaa can be Cys or D-Cys
  misc_feature (6)..(6): Xaa can be Cys or D-Cys
  misc_feature (14)..(14): Xaa can be Cys or D-Cys
AXCEFXCNPACTGX

SEQ ID NO: 1981 - protein, 15 aa, Artificial Sequence
  Synthetically generated peptide
  misc_feature (2)..(2): Xaa can be Cys or D-Cys
  misc_feature (6)..(6): Xaa can be Cys or D-Cys
  misc_feature (14)..(14): Xaa can be Cys or D-Cys
AXCEFXCNPACTGXK

SEQ ID NO: 1982 - protein, 15 aa, Artificial Sequence
  Synthetically generated peptide
  misc_feature (2)..(2): Xaa can be Cys or D-Cys
  misc_feature (6)..(6): Xaa can be Cys or D-Cys
  misc_feature (14)..(14): Xaa can be Cys or D-Cys
AXCEFXCNPACTGXY

SEQ ID NO: 1983 - protein, 14 aa, Artificial Sequence
  Synthetically generated peptide
  misc_feature (2)..(2): Xaa can be Cys or D-Cys
  misc_feature (6)..(6): Xaa can be Cys or D-Cys
AXCEFXCTPACTGC

SEQ ID NO: 1984 - protein, 15 aa, Artificial Sequence
  Synthetically generated peptide
  misc_feature (2)..(2): Xaa can be Cys or D-Cys
  misc_feature (6)..(6): Xaa can be Cys or D-Cys
AXCEFXCTPACTGCK

SEQ ID NO: 1985 - protein, 15 aa, Artificial Sequence
  Synthetically generated peptide
  misc_feature (2)..(2): Xaa can be Cys or D-Cys
  misc_feature (6)..(6): Xaa can be Cys or D-Cys
AXCEFXCTPACTGCY

SEQ ID NO: 1986 - protein, 14 aa, Artificial Sequence
  Synthetically generated peptide
  misc_feature (2)..(2): Xaa can be Cys or D-Cys
  misc_feature (6)..(6): Xaa can be Cys or D-Cys
  misc_feature (14)..(14): Xaa can be Cys or D-Cys
AXCEFXCTPACTGX

SEQ ID NO: 1987 - protein, 15 aa, Artificial Sequence
  Synthetically generated peptide
  misc_feature (2)..(2): Xaa can be Cys or D-Cys
  misc_feature (6)..(6): Xaa can be Cys or D-Cys
  misc_feature (14)..(14): Xaa can be Cys or D-Cys
AXCEFXCTPACTGXK

SEQ ID NO: 1988 - protein, 15 aa, Artificial Sequence
  Synthetically generated peptide
  misc_feature (2)..(2): Xaa can be Cys or D-Cys
  misc_feature (6)..(6): Xaa can be Cys or D-Cys
  misc_feature (14)..(14): Xaa can be Cys or D-Cys
AXCEFXCTPACTGXY

SEQ ID NO: 1989 - protein, 14 aa, Artificial Sequence
  Synthetically generated peptide
  misc_feature (2)..(2): Xaa can be Cys or D-Cys
AXCEWCCNPACTGC

SEQ ID NO: 1990 - protein, 15 aa, Artificial Sequence
  Synthetically generated peptide
  misc_feature (2)..(2): Xaa can be Cys or D-Cys
AXCEWCCNPACTGCK

SEQ ID NO: 1991 - protein, 15 aa, Artificial Sequence
  Synthetically generated peptide
  misc_feature (2)..(2): Xaa can be Cys or D-Cys
AXCEWCCNPACTGCY

SEQ ID NO: 1992 - protein, 14 aa, Artificial Sequence
  Synthetically generated peptide
  misc_feature (2)..(2): Xaa can be Cys or D-Cys
  misc_feature (14)..(14): Xaa can be Cys or D-Cys
AXCEWCCNPACTGX

SEQ ID NO: 1993 - protein, 15 aa, Artificial Sequence
  Synthetically generated peptide
  misc_feature (2)..(2): Xaa can be Cys or D-Cys
  misc_feature (14)..(14): Xaa can be Cys or D-Cys
AXCEWCCNPACTGXK

SEQ ID NO: 1994 - protein, 15 aa, Artificial Sequence
  Synthetically generated peptide
  misc_feature (2)..(2): Xaa can be Cys or D-Cys
  misc_feature (14)..(14): Xaa can be Cys or D-Cys
AXCEWCCNPACTGXY

SEQ ID NO: 1995 - protein, 14 aa, Artificial Sequence
  Synthetically generated peptide
  misc_feature (2)..(2): Xaa can be Cys or D-Cys
AXCEWCCTPACTGC

SEQ ID NO: 1996 - protein, 15 aa, Artificial Sequence
  Synthetically generated peptide
  misc_feature (2)..(2): Xaa can be Cys or D-Cys
AXCEWCCTPACTGCK

SEQ ID NO: 1997 - protein, 15 aa, Artificial Sequence
  Synthetically generated peptide
  misc_feature (2)..(2): Xaa can be Cys or D-Cys
AXCEWCCTPACTGCY

SEQ ID NO: 1998 - protein, 14 aa, Artificial Sequence
  Synthetically generated peptide
  misc_feature (2)..(2): Xaa can be Cys or D-Cys
  misc_feature (14)..(14): Xaa can be Cys or D-Cys
AXCEWCCTPACTGX

SEQ ID NO: 1999 - protein, 15 aa, Artificial Sequence
  Synthetically generated peptide
  misc_feature (2)..(2): Xaa can be Cys or D-Cys
  misc_feature (14)..(14): Xaa can be Cys or D-Cys
AXCEWCCTPACTGXK

SEQ ID NO: 2000 - protein, 15 aa, Artificial Sequence
  Synthetically generated peptide
  misc_feature (2)..(2): Xaa can be Cys or D-Cys
  misc_feature (14)..(14): Xaa can be Cys or D-Cys
AXCEWCCTPACTGXY

SEQ ID NO: 2001 - protein, 14 aa, Artificial Sequence
  Synthetically generated peptide
  misc_feature (2)..(2): Xaa can be Cys or D-Cys
  misc_feature (6)..(6): Xaa can be Cys or D-Cys
AXCEWXCNPACTGC

SEQ ID NO: 2002 - protein, 15 aa, Artificial Sequence
  Synthetically generated peptide
  misc_feature (2)..(2): Xaa can be Cys or D-Cys
  misc_feature (6)..(6): Xaa can be Cys or D-Cys
AXCEWXCNPACTGCK

SEQ ID NO: 2003 - protein, 15 aa, Artificial Sequence
  Synthetically generated peptide
  misc_feature (2)..(2): Xaa can be Cys or D-Cys
  misc_feature (6)..(6): Xaa can be Cys or D-Cys
AXCEWXCNPACTGCY

SEQ ID NO: 2004 - protein, 14 aa, Artificial Sequence
  Synthetically generated peptide
  misc_feature (2)..(2): Xaa can be Cys or D-Cys
  misc_feature (6)..(6): Xaa can be Cys or D-Cys
  misc_feature (14)..(14): Xaa can be Cys or D-Cys
AXCEWXCNPACTGX

SEQ ID NO: 2005 - protein, 15 aa, Artificial Sequence
  Synthetically generated peptide
  misc_feature (2)..(2): Xaa can be Cys or D-Cys
  misc_feature (6)..(6): Xaa can be Cys or D-Cys
  misc_feature (14)..(14): Xaa can be Cys or D-Cys
AXCEWXCNPACTGXK

SEQ ID NO: 2006 - protein, 15 aa, Artificial Sequence
  Synthetically generated peptide
  misc_feature (2)..(2): Xaa can be Cys or D-Cys
  misc_feature (6)..(6): Xaa can be Cys or D-Cys
  misc_feature (14)..(14): Xaa can be Cys or D-Cys
AXCEWXCNPACTGXY

SEQ ID NO: 2007 - protein, 14 aa, Artificial Sequence
  Synthetically generated peptide
  misc_feature (2)..(2): Xaa can be Cys or D-Cys
  misc_feature (6)..(6): Xaa can be Cys or D-Cys
AXCEWXCTPACTGC

SEQ ID NO: 2008 - protein, 15 aa, Artificial Sequence
  Synthetically generated peptide
  misc_feature (2)..(2): Xaa can be Cys or D-Cys
  misc_feature (6)..(6): Xaa can be Cys or D-Cys
AXCEWXCTPACTGCK

SEQ ID NO: 2009 - protein, 15 aa, Artificial Sequence
  Synthetically generated peptide
  misc_feature (2)..(2): Xaa can be Cys or D-Cys
  misc_feature (6)..(6): Xaa can be Cys or D-Cys
AXCEWXCTPACTGCY

SEQ ID NO: 2010 - protein, 14 aa, Artificial Sequence
  Synthetically generated peptide
  misc_feature (2)..(2): Xaa can be Cys or D-Cys
  misc_feature (6)..(6): Xaa can be Cys or D-Cys
  misc_feature (14)..(14): Xaa can be Cys or D-Cys
AXCEWXCTPACTGX

SEQ ID NO: 2011 - protein, 15 aa, Artificial Sequence
  Synthetically generated peptide
  misc_feature (2)..(2): Xaa can be Cys or D-Cys
  misc_feature (6)..(6): Xaa can be Cys or D-Cys
  misc_feature (14)..(14): Xaa can be Cys or D-Cys
AXCEWXCTPACTGXK

SEQ ID NO: 2012 - protein, 15 aa, Artificial Sequence
  Synthetically generated peptide
  misc_feature (2)..(2): Xaa can be Cys or D-Cys
  misc_feature (6)..(6): Xaa can be Cys or D-Cys
  misc_feature (14)..(14): Xaa can be Cys or D-Cys
AXCEWXCTPACTGXY

SEQ ID NO: 2013 - protein, 15 aa, Artificial Sequence
  Synthetically generated peptide
AACCEVCCNPACTGC

SEQ ID NO: 2014 - protein, 16 aa, Artificial Sequence
  Synthetically generated peptide
AACCEVCCNPACTGCK

SEQ ID NO: 2015 - protein, 16 aa, Artificial Sequence
  Synthetically generated peptide
AACCEVCCNPACTGCY

SEQ ID NO: 2016 - protein, 15 aa, Artificial Sequence
  Synthetically generated peptide
  misc_feature (15)..(15): Xaa can be Cys or D-Cys
AACCEVCCNPACTGX

SEQ ID NO: 2017 - protein, 16 aa, Artificial Sequence
  Synthetically generated peptide
  misc_feature (15)..(15): Xaa can be Cys or D-Cys
AACCEVCCNPACTGXK

SEQ ID NO: 2018 - protein, 16 aa, Artificial Sequence
  Synthetically generated peptide
  misc_feature (15)..(15): Xaa can be Cys or D-Cys
AACCEVCCNPACTGXY

SEQ ID NO: 2019 - protein, 15 aa, Artificial Sequence
  Synthetically generated peptide
AACCEVCCTPACTGC

SEQ ID NO: 2020 - protein, 16 aa, Artificial Sequence
  Synthetically generated peptide
AACCEVCCTPACTGCK

SEQ ID NO: 2021 - protein, 16 aa, Artificial Sequence
  Synthetically generated peptide
AACCEVCCTPACTGCY

SEQ ID NO: 2022 - protein, 15 aa, Artificial Sequence
  Synthetically generated peptide
  misc_feature (15)..(15): Xaa can be Cys or D-Cys
AACCEVCCTPACTGX

SEQ ID NO: 2023 - protein, 16 aa, Artificial Sequence
  Synthetically generated peptide
  misc_feature (15)..(15): Xaa can be Cys or D-Cys
AACCEVCCTPACTGXK

SEQ ID NO: 2024 - protein, 16 aa, Artificial Sequence
  Synthetically generated peptide
  misc_feature (15)..(15): Xaa can be Cys or D-Cys
AACCEVCCTPACTGXY

SEQ ID NO: 2025 - protein, 15 aa, Artificial Sequence
  Synthetically generated peptide
  misc_feature (7)..(7): Xaa can be Cys or D-Cys
AACCEVXCNPACTGC

SEQ ID NO: 2026 - protein, 16 aa, Artificial Sequence
  Synthetically generated peptide
  misc_feature (7)..(7): Xaa can be Cys or D-Cys
AACCEVXCNPACTGCK

SEQ ID NO: 2027 - protein, 16 aa, Artificial Sequence
  Synthetically generated peptide
  misc_feature (7)..(7): Xaa can be Cys or D-Cys
AACCEVXCNPACTGCY

SEQ ID NO: 2028 - protein, 15 aa, Artificial Sequence
  Synthetically generated peptide
  misc_feature (7)..(7): Xaa can be Cys or D-Cys
  misc_feature (15)..(15): Xaa can be Cys or D-Cys
AACCEVXCNPACTGX

SEQ ID NO: 2029 - protein, 16 aa, Artificial Sequence
  Synthetically generated peptide
  misc_feature (7)..(7): Xaa can be Cys or D-Cys
  misc_feature (15)..(15): Xaa can be Cys or D-Cys
AACCEVXCNPACTGXK

SEQ ID NO: 2030 - protein, 16 aa, Artificial Sequence
  Synthetically generated peptide
  misc_feature (7)..(7): Xaa can be Cys or D-Cys
  misc_feature (15)..(15): Xaa can be Cys or D-Cys
AACCEVXCNPACTGXY

SEQ ID NO: 2031 - protein, 15 aa, Artificial Sequence
  Synthetically generated peptide
  misc_feature (7)..(7): Xaa can be Cys or D-Cys
AACCEVXCTPACTGC

SEQ ID NO: 2032 - protein, 16 aa, Artificial Sequence
  Synthetically generated peptide
  misc_feature (7)..(7): Xaa can be Cys or D-Cys
AACCEVXCTPACTGCK

SEQ ID NO: 2033 - protein, 16 aa, Artificial Sequence
  Synthetically generated peptide
  misc_feature (7)..(7): Xaa can be Cys or D-Cys
AACCEVXCTPACTGCY

SEQ ID NO: 2034 - protein, 15 aa, Artificial Sequence
  Synthetically generated peptide
  misc_feature (7)..(7): Xaa can be Cys or D-Cys
  misc_feature (15)..(15): Xaa can be Cys or D-Cys
AACCEVXCTPACTGX

SEQ ID NO: 2035 - protein, 16 aa, Artificial Sequence
  Synthetically generated peptide
  misc_feature (7)..(7): Xaa can be Cys or D-Cys
  misc_feature (15)..(15): Xaa can be Cys or D-Cys
AACCEVXCTPACTGXK

SEQ ID NO: 2036 - protein, 16 aa, Artificial Sequence
  Synthetically generated peptide
  misc_feature (7)..(7): Xaa can be Cys or D-Cys
  misc_feature (15)..(15): Xaa can be Cys or D-Cys
AACCEVXCTPACTGXY

SEQ ID NO: 2037 - protein, 15 aa, Artificial Sequence
  Synthetically generated peptide
AACCEICCNPACTGC

SEQ ID NO: 2038 - protein, 16 aa, Artificial Sequence
  Synthetically generated peptide
AACCEICCNPACTGCK

SEQ ID NO: 2039 - protein, 16 aa, Artificial Sequence
  Synthetically generated peptide
AACCEICCNPACTGCY

SEQ ID NO: 2040 - protein, 15 aa, Artificial Sequence
  Synthetically generated peptide
  misc_feature (15)..(15): Xaa can be Cys or D-Cys
AACCEICCNPACTGX

SEQ ID NO: 2041 - protein, 16 aa, Artificial Sequence
  Synthetically generated peptide
  misc_feature (15)..(15): Xaa can be Cys or D-Cys
AACCEICCNPACTGXK

SEQ ID NO: 2042 - protein, 16 aa, Artificial Sequence
  Synthetically generated peptide
  misc_feature (15)..(15): Xaa can be Cys or D-Cys
AACCEICCNPACTGXY

SEQ ID NO: 2043 - protein, 15 aa, Artificial Sequence
  Synthetically generated peptide
AACCEICCTPACTGC

SEQ ID NO: 2044 - protein, 16 aa, Artificial Sequence
  Synthetically generated peptide
AACCEICCTPACTGCK

SEQ ID NO: 2045 - protein, 16 aa, Artificial Sequence
  Synthetically generated peptide
AACCEICCTPACTGCY

SEQ ID NO: 2046 - protein, 15 aa, Artificial Sequence
  Synthetically generated peptide
  misc_feature (15)..(15): Xaa can be Cys or D-Cys
AACCEICCTPACTGX

SEQ ID NO: 2047 - protein, 16 aa, Artificial Sequence
  Synthetically generated peptide
  misc_feature (15)..(15): Xaa can be Cys or D-Cys
AACCEICCTPACTGXK

SEQ ID NO: 2048 - protein, 16 aa, Artificial Sequence
  Synthetically generated peptide
  misc_feature (15)..(15): Xaa can be Cys or D-Cys
AACCEICCTPACTGXY

SEQ ID NO: 2049 - protein, 15 aa, Artificial Sequence
  Synthetically generated peptide
  misc_feature (7)..(7): Xaa can be Cys or D-Cys
AACCEIXCNPACTGC

SEQ ID NO: 2050 - protein, 16 aa, Artificial Sequence
  Synthetically generated peptide
  misc_feature (7)..(7): Xaa can be Cys or D-Cys
AACCEIXCNPACTGCK

SEQ ID NO: 2051 - protein, 16 aa, Artificial Sequence
  Synthetically generated peptide
  misc_feature (7)..(7): Xaa can be Cys or D-Cys
AACCEIXCNPACTGCY

SEQ ID NO: 2052 - protein, 15 aa, Artificial Sequence
  Synthetically generated peptide
  misc_feature (7)..(7): Xaa can be Cys or D-Cys
  misc_feature (15)..(15): Xaa can be Cys or D-Cys
AACCEIXCNPACTGX

SEQ ID NO: 2053 - protein, 16 aa, Artificial Sequence
  Synthetically generated peptide
  misc_feature (7)..(7): Xaa can be Cys or D-Cys
  misc_feature (15)..(15): Xaa can be Cys or D-Cys
AACCEIXCNPACTGXK

SEQ ID NO: 2054 - protein, 16 aa, Artificial Sequence
  Synthetically generated peptide
  misc_feature (7)..(7): Xaa can be Cys or D-Cys
  misc_feature (15)..(15): Xaa can be Cys or D-Cys
AACCEIXCNPACTGXY

SEQ ID NO: 2055 - protein, 15 aa, Artificial Sequence
  Synthetically generated peptide
  misc_feature (7)..(7): Xaa can be Cys or D-Cys
AACCEIXCTPACTGC

SEQ ID NO: 2056 - protein, 16 aa, Artificial Sequence
  Synthetically generated peptide
  misc_feature (7)..(7): Xaa can be Cys or D-Cys
AACCEIXCTPACTGCK

SEQ ID NO: 2057 - protein, 16 aa, Artificial Sequence
  Synthetically generated peptide
  misc_feature (7)..(7): Xaa can be Cys or D-Cys
AACCEIXCTPACTGCY

SEQ ID NO: 2058 - protein, 15 aa, Artificial Sequence
  Synthetically generated peptide
  misc_feature (7)..(7): Xaa can be Cys or D-Cys
  misc_feature (15)..(15): Xaa can be Cys or D-Cys
AACCEIXCTPACTGX

SEQ ID NO: 2059 - protein, 16 aa, Artificial Sequence
  Synthetically generated peptide
  misc_feature (7)..(7): Xaa can be Cys or D-Cys
  misc_feature (15)..(15): Xaa can be Cys or D-Cys
AACCEIXCTPACTGXK

SEQ ID NO: 2060 - protein, 16 aa, Artificial Sequence
  Synthetically generated peptide
  misc_feature (7)..(7): Xaa can be Cys or D-Cys
  misc_feature (15)..(15): Xaa can be Cys or D-Cys
AACCEIXCTPACTGXY

SEQ ID NO: 2061 - protein, 15 aa, Artificial Sequence
  Synthetically generated peptide
AACCELCCNPACTGC

SEQ ID NO: 2062 - protein, 16 aa, Artificial Sequence
  Synthetically generated peptide
AACCELCCNPACTGCK

SEQ ID NO: 2063 - protein, 16 aa, Artificial Sequence
  Synthetically generated peptide
AACCELCCNPACTGCY

SEQ ID NO: 2064 - protein, 15 aa, Artificial Sequence
  Synthetically generated peptide
  misc_feature (15)..(15): Xaa can be Cys or D-Cys
AACCELCCNPACTGX

SEQ ID NO: 2065 - protein, 16 aa, Artificial Sequence
  Synthetically generated peptide
  misc_feature (15)..(15): Xaa can be Cys or D-Cys
AACCELCCNPACTGXK

SEQ ID NO: 2066 - protein, 16 aa, Artificial Sequence
  Synthetically generated peptide
  misc_feature (15)..(15): Xaa can be Cys or D-Cys
AACCELCCNPACTGXY

SEQ ID NO: 2067 - protein, 15 aa, Artificial Sequence
  Synthetically generated peptide
AACCELCCTPACTGC

SEQ ID NO: 2068 - protein, 16 aa, Artificial Sequence
  Synthetically generated peptide
AACCELCCTPACTGCK

SEQ ID NO: 2069 - protein, 16 aa, Artificial Sequence
  Synthetically generated peptide
AACCELCCTPACTGCY

SEQ ID NO: 2070 - protein, 15 aa, Artificial Sequence
  Synthetically generated peptide
  misc_feature (15)..(15): Xaa can be Cys or D-Cys
AACCELCCTPACTGX

SEQ ID NO: 2071 - protein, 16 aa, Artificial Sequence
  Synthetically generated peptide
  misc_feature (15)..(15): Xaa can be Cys or D-Cys
AACCELCCTPACTGXK

SEQ ID NO: 2072 - protein, 16 aa, Artificial Sequence
  Synthetically generated peptide
  misc_feature (15)..(15): Xaa can be Cys or D-Cys
AACCELCCTPACTGXY

SEQ ID NO: 2073 - protein, 15 aa, Artificial Sequence
  Synthetically generated peptide
  misc_feature (7)..(7): Xaa can be Cys or D-Cys
AACCELXCNPACTGC

SEQ ID NO: 2074 - protein, 16 aa, Artificial Sequence
  Synthetically generated peptide
  misc_feature (7)..(7): Xaa can be Cys or D-Cys
AACCELXCNPACTGCK

SEQ ID NO: 2075 - protein, 16 aa, Artificial Sequence
  Synthetically generated peptide
  misc_feature (7)..(7): Xaa can be Cys or D-Cys
AACCELXCNPACTGCY

SEQ ID NO: 2076 - protein, 15 aa, Artificial Sequence
  Synthetically generated peptide
  misc_feature (7)..(7): Xaa can be Cys or D-Cys
  misc_feature (15)..(15): Xaa can be Cys or D-Cys
AACCELXCNPACTGX

SEQ ID NO: 2077 - protein, 16 aa, Artificial Sequence
  Synthetically generated peptide
  misc_feature (7)..(7): Xaa can be Cys or D-Cys
  misc_feature (15)..(15): Xaa can be Cys or D-Cys
AACCELXCNPACTGXK

SEQ ID NO: 2078 - protein, 16 aa, Artificial Sequence
  Synthetically generated peptide
  misc_feature (7)..(7): Xaa can be Cys or D-Cys
  misc_feature (15)..(15): Xaa can be Cys or D-Cys
AACCELXCNPACTGXY

SEQ ID NO: 2079 - protein, 15 aa, Artificial Sequence
  Synthetically generated peptide
  misc_feature (7)..(7): Xaa can be Cys or D-Cys
AACCELXCTPACTGC

SEQ ID NO: 2080 - protein, 16 aa, Artificial Sequence
  Synthetically generated peptide
  misc_feature (7)..(7): Xaa can be Cys or D-Cys
AACCELXCTPACTGCK

SEQ ID NO: 2081 - protein, 16 aa, Artificial Sequence
  Synthetically generated peptide
  misc_feature (7)..(7): Xaa can be Cys or D-Cys
AACCELXCTPACTGCY

SEQ ID NO: 2082 - protein, 15 aa, Artificial Sequence
  Synthetically generated peptide
  misc_feature (7)..(7): Xaa can be Cys or D-Cys
  misc_feature (15)..(15): Xaa can be Cys or D-Cys
AACCELXCTPACTGX

SEQ ID NO: 2083 - protein, 16 aa, Artificial Sequence
  Synthetically generated peptide
  misc_feature (7)..(7): Xaa can be Cys or D-Cys
  misc_feature (15)..(15): Xaa can be Cys or D-Cys
AACCELXCTPACTGXK

SEQ ID NO: 2084 - protein, 16 aa, Artificial Sequence
  Synthetically generated peptide
  misc_feature (7)..(7): Xaa can be Cys or D-Cys
  misc_feature (15)..(15): Xaa can be Cys or D-Cys
AACCELXCTPACTGXY

SEQ ID NO: 2085 - protein, 15 aa, Artificial Sequence
  Synthetically generated peptide
AACCEYCCNPACTGC

SEQ ID NO: 2086 - protein, 16 aa, Artificial Sequence
  Synthetically generated peptide
AACCEYCCNPACTGCK

SEQ ID NO: 2087 - protein, 16 aa, Artificial Sequence
  Synthetically generated peptide
AACCEYCCNPACTGCY

SEQ ID NO: 2088 - protein, 15 aa, Artificial Sequence
  Synthetically generated peptide
  misc_feature (15)..(15): Xaa can be Cys or D-Cys
AACCEYCCNPACTGX

SEQ ID NO: 2089 - protein, 16 aa, Artificial Sequence
  Synthetically generated peptide
  misc_feature (15)..(15): Xaa can be Cys or D-Cys
AACCEYCCNPACTGXK

SEQ ID NO: 2090 - protein, 16 aa, Artificial Sequence
  Synthetically generated peptide
  misc_feature (15)..(15): Xaa can be Cys or D-Cys
AACCEYCCNPACTGXY

SEQ ID NO: 2091 - protein, 15 aa, Artificial Sequence
  Synthetically generated peptide
AACCEYCCTPACTGC

SEQ ID NO: 2092 - protein, 16 aa, Artificial Sequence
  Synthetically generated peptide
AACCEYCCTPACTGCK

SEQ ID NO: 2093 - protein, 16 aa, Artificial Sequence
  Synthetically generated peptide
AACCEYCCTPACTGCY

SEQ ID NO: 2094 - protein, 15 aa, Artificial Sequence
  Synthetically generated peptide
  misc_feature (15)..(15): Xaa can be Cys or D-Cys
AACCEYCCTPACTGX

SEQ ID NO: 2095 - protein, 16 aa, Artificial Sequence
  Synthetically generated peptide
  misc_feature (15)..(15): Xaa can be Cys or D-Cys
AACCEYCCTPACTGXK

SEQ ID NO: 2096 - protein, 16 aa, Artificial Sequence
  Synthetically generated peptide
  misc_feature (15)..(15): Xaa can be Cys or D-Cys
AACCEYCCTPACTGXY

SEQ ID NO: 2097 - protein, 15 aa, Artificial Sequence
  Synthetically generated peptide
  misc_feature (7)..(7): Xaa can be Cys or D-Cys
AACCEYXCNPACTGC

SEQ ID NO: 2098 - protein, 16 aa, Artificial Sequence
  Synthetically generated peptide
  misc_feature (7)..(7): Xaa can be Cys or D-Cys
AACCEYXCNPACTGCK

SEQ ID NO: 2099 - protein, 16 aa, Artificial Sequence
  Synthetically generated peptide
  misc_feature (7)..(7): Xaa can be Cys or D-Cys
AACCEYXCNPACTGCY

SEQ ID NO: 2100 - protein, 15 aa, Artificial Sequence
  Synthetically generated peptide
  misc_feature (7)..(7): Xaa can be Cys or D-Cys
  misc_feature (15)..(15): Xaa can be Cys or D-Cys
AACCEYXCNPACTGX

SEQ ID NO: 2101 - protein, 16 aa, Artificial Sequence
  Synthetically generated peptide
  misc_feature (7)..(7): Xaa can be Cys or D-Cys
  misc_feature (15)..(15): Xaa can be Cys or D-Cys
AACCEYXCNPACTGXK

SEQ ID NO: 2102 - protein, 16 aa, Artificial Sequence
  Synthetically generated peptide
  misc_feature (7)..(7): Xaa can be Cys or D-Cys
  misc_feature (15)..(15): Xaa can be Cys or D-Cys
AACCEYXCNPACTGXY

SEQ ID NO: 2103 - protein, 15 aa, Artificial Sequence
  Synthetically generated peptide
  misc_feature (7)..(7): Xaa can be Cys or D-Cys
AACCEYXCTPACTGC

SEQ ID NO: 2104 - protein, 16 aa, Artificial Sequence
  Synthetically generated peptide
  misc_feature (7)..(7): Xaa can be Cys or D-Cys
AACCEYXCTPACTGCK

SEQ ID NO: 2105 - protein, 16 aa, Artificial Sequence
  Synthetically generated peptide
  misc_feature (7)..(7): Xaa can be Cys or D-Cys
AACCEYXCTPACTGCY

SEQ ID NO: 2106 - protein, 15 aa, Artificial Sequence
  Synthetically generated peptide
  misc_feature (7)..(7): Xaa can be Cys or D-Cys
  misc_feature (15)..(15): Xaa can be Cys or D-Cys
AACCEYXCTPACTGX

SEQ ID NO: 2107 - protein, 16 aa, Artificial Sequence
  Synthetically generated peptide
  misc_feature (7)..(7): Xaa can be Cys or D-Cys
  misc_feature (15)..(15): Xaa can be Cys or D-Cys
AACCEYXCTPACTGXK

SEQ ID NO: 2108 - protein, 16 aa, Artificial Sequence
  Synthetically generated peptide
  misc_feature (7)..(7): Xaa can be Cys or D-Cys
  misc_feature (15)..(15): Xaa can be Cys or D-Cys
AACCEYXCTPACTGXY

SEQ ID NO: 2109 - protein, 15 aa, Artificial Sequence
  Synthetically generated peptide
AACCEFCCNPACTGC

SEQ ID NO: 2110 - protein, 16 aa, Artificial Sequence
  Synthetically generated peptide
AACCEFCCNPACTGCK

SEQ ID NO: 2111 - protein, 16 aa, Artificial Sequence
  Synthetically generated peptide
AACCEFCCNPACTGCY

SEQ ID NO: 2112 - protein, 15 aa, Artificial Sequence
  Synthetically generated peptide
  misc_feature (15)..(15): Xaa can be Cys or D-Cys
AACCEFCCNPACTGX

SEQ ID NO: 2113 - protein, 16 aa, Artificial Sequence
  Synthetically generated peptide
  misc_feature (15)..(15): Xaa can be Cys or D-Cys
AACCEFCCNPACTGXK

SEQ ID NO: 2114 - protein, 16 aa, Artificial Sequence
  Synthetically generated peptide
  misc_feature (15)..(15): Xaa can be Cys or D-Cys
AACCEFCCNPACTGXY

SEQ ID NO: 2115 - protein, 15 aa, Artificial Sequence
  Synthetically generated peptide
AACCEFCCTPACTGC

SEQ ID NO: 2116 - protein, 16 aa, Artificial Sequence
  Synthetically generated peptide
AACCEFCCTPACTGCK

SEQ ID NO: 2117 - protein, 16 aa, Artificial Sequence
  Synthetically generated peptide
AACCEFCCTPACTGCY

SEQ ID NO: 2118 - protein, 15 aa, Artificial Sequence
  Synthetically generated peptide
  misc_feature (15)..(15): Xaa can be Cys or D-Cys
AACCEFCCTPACTGX

SEQ ID NO: 2119 - protein, 16 aa, Artificial Sequence
  Synthetically generated peptide
  misc_feature (15)..(15): Xaa can be Cys or D-Cys
AACCEFCCTPACTGXK

SEQ ID NO: 2120 - protein, 16 aa, Artificial Sequence
  Synthetically generated peptide
  misc_feature (15)..(15): Xaa can be Cys or D-Cys
AACCEFCCTPACTGXY

SEQ ID NO: 2121 - protein, 15 aa, Artificial Sequence
  Synthetically generated peptide
  misc_feature (7)..(7): Xaa can be Cys or D-Cys
AACCEFXCNPACTGC

SEQ ID NO: 2122 - protein, 16 aa, Artificial Sequence
  Synthetically generated peptide
  misc_feature (7)..(7): Xaa can be Cys or D-Cys
AACCEFXCNPACTGCK

SEQ ID NO: 2123 - protein, 16 aa, Artificial Sequence
  Synthetically generated peptide
  misc_feature (7)..(7): Xaa can be Cys or D-Cys
AACCEFXCNPACTGCY

SEQ ID NO: 2124 - protein, 15 aa, Artificial Sequence
  Synthetically generated peptide
  misc_feature (7)..(7): Xaa can be Cys or D-Cys
  misc_feature (15)..(15): Xaa can be Cys or D-Cys
AACCEFXCNPACTGX

SEQ ID NO: 2125 - protein, 16 aa, Artificial Sequence
  Synthetically generated peptide
  misc_feature (7)..(7): Xaa can be Cys or D-Cys
  misc_feature (15)..(15): Xaa can be Cys or D-Cys
AACCEFXCNPACTGXK

SEQ ID NO: 2126 - protein, 16 aa, Artificial Sequence
  Synthetically generated peptide
  misc_feature (7)..(7): Xaa can be Cys or D-Cys
  misc_feature (15)..(15): Xaa can be Cys or D-Cys
AACCEFXCNPACTGXY

SEQ ID NO: 2127 - protein, 15 aa, Artificial Sequence
  Synthetically generated peptide
  misc_feature (7)..(7): Xaa can be Cys or D-Cys
AACCEFXCTPACTGC

SEQ ID NO: 2128 - protein, 16 aa, Artificial Sequence
  Synthetically generated peptide
  misc_feature (7)..(7): Xaa can be Cys or D-Cys
AACCEFXCTPACTGCK

SEQ ID NO: 2129 - protein, 16 aa, Artificial Sequence
  Synthetically generated peptide
  misc_feature (7)..(7): Xaa can be Cys or D-Cys
AACCEFXCTPACTGCY

SEQ ID NO: 2130 - protein, 15 aa, Artificial Sequence
  Synthetically generated peptide
  misc_feature (7)..(7): Xaa can be Cys or D-Cys
  misc_feature (15)..(15): Xaa can be Cys or D-Cys
AACCEFXCTPACTGX

SEQ ID NO: 2131 - protein, 16 aa, Artificial Sequence
  Synthetically generated peptide
  misc_feature (7)..(7): Xaa can be Cys or D-Cys
  misc_feature (15)..(15): Xaa can be Cys or D-Cys
AACCEFXCTPACTGXK

SEQ ID NO: 2132 - protein, 16 aa, Artificial Sequence
  Synthetically generated peptide
  misc_feature (7)..(7): Xaa can be Cys or D-Cys
  misc_feature (15)..(15): Xaa can be Cys or D-Cys
AACCEFXCTPACTGXY

SEQ ID NO: 2133 - protein, 15 aa, Artificial Sequence
  Synthetically generated peptide
AACCEWCCNPACTGC

SEQ ID NO: 2134 - protein, 16 aa, Artificial Sequence
  Synthetically generated peptide
AACCEWCCNPACTGCK

SEQ ID NO: 2135 - protein, 16 aa, Artificial Sequence
  Synthetically generated peptide
AACCEWCCNPACTGCY

SEQ ID NO: 2136 - protein, 15 aa, Artificial Sequence
  Synthetically generated peptide
  misc_feature (15)..(15): Xaa can be Cys or D-Cys
AACCEWCCNPACTGX

SEQ ID NO: 2137 - protein, 16 aa, Artificial Sequence
  Synthetically generated peptide
  misc_feature (15)..(15): Xaa can be Cys or D-Cys
AACCEWCCNPACTGXK

SEQ ID NO: 2138 - protein, 16 aa, Artificial Sequence
  Synthetically generated peptide
  misc_feature (15)..(15): Xaa can be Cys or D-Cys
AACCEWCCNPACTGXY

SEQ ID NO: 2139 - protein, 15 aa, Artificial Sequence
  Synthetically generated peptide
AACCEWCCTPACTGC

SEQ ID NO: 2140 - protein, 16 aa, Artificial Sequence
  Synthetically generated peptide
AACCEWCCTPACTGCK

SEQ ID NO: 2141 - protein, 16 aa, Artificial Sequence
  Synthetically generated peptide
AACCEWCCTPACTGCY

SEQ ID NO: 2142 - protein, 15 aa, Artificial Sequence
  Synthetically generated peptide
  misc_feature (15)..(15): Xaa can be Cys or D-Cys
AACCEWCCTPACTGX

SEQ ID NO: 2143 - protein, 16 aa, Artificial Sequence
  Synthetically generated peptide
  misc_feature (15)..(15): Xaa can be Cys or D-Cys
AACCEWCCTPACTGXK

SEQ ID NO: 2144 - protein, 16 aa, Artificial Sequence
  Synthetically generated peptide
  misc_feature (15)..(15): Xaa can be Cys or D-Cys
AACCEWCCTPACTGXY

SEQ ID NO: 2145 - protein, 15 aa, Artificial Sequence
  Synthetically generated peptide
  misc_feature (7)..(7): Xaa can be Cys or D-Cys
AACCEWXCNPACTGC

SEQ ID NO: 2146 - protein, 16 aa, Artificial Sequence
  Synthetically generated peptide
  misc_feature (7)..(7): Xaa can be Cys or D-Cys
AACCEWXCNPACTGCK

SEQ ID NO: 2147 - protein, 16 aa, Artificial Sequence
  Synthetically generated peptide
  misc_feature (7)..(7): Xaa can be Cys or D-Cys
AACCEWXCNPACTGCY

SEQ ID NO: 2148 - protein, 15 aa, Artificial Sequence
  Synthetically generated peptide
  misc_feature (7)..(7): Xaa can be Cys or D-Cys
  misc_feature (15)..(15): Xaa can be Cys or D-Cys
AACCEWXCNPACTGX

SEQ ID NO: 2149 - protein, 16 aa, Artificial Sequence
  Synthetically generated peptide
  misc_feature (7)..(7): Xaa can be Cys or D-Cys
  misc_feature (15)..(15): Xaa can be Cys or D-Cys
AACCEWXCNPACTGXK

SEQ ID NO: 2150 - protein, 16 aa, Artificial Sequence
  Synthetically generated peptide
  misc_feature (7)..(7): Xaa can be Cys or D-Cys
  misc_feature (15)..(15): Xaa can be Cys or D-Cys
AACCEWXCNPACTGXY

SEQ ID NO: 2151 - protein, 15 aa, Artificial Sequence
  Synthetically generated peptide
  misc_feature (7)..(7): Xaa can be Cys or D-Cys
AACCEWXCTPACTGC

SEQ ID NO: 2152 - protein, 16 aa, Artificial Sequence
  Synthetically generated peptide
  misc_feature (7)..(7): Xaa can be Cys or D-Cys
AACCEWXCTPACTGCK

SEQ ID NO: 2153 - protein, 16 aa, Artificial Sequence
  Synthetically generated peptide
  misc_feature (7)..(7): Xaa can be Cys or D-Cys
AACCEWXCTPACTGCY

SEQ ID NO: 2154 - protein, 15 aa, Artificial Sequence
  Synthetically generated peptide
  misc_feature (7)..(7): Xaa can be Cys or D-Cys
  misc_feature (15)..(15): Xaa can be Cys or D-Cys
AACCEWXCTPACTGX

SEQ ID NO: 2155 - protein, 16 aa, Artificial Sequence
  Synthetically generated peptide
  misc_feature (7)..(7): Xaa can be Cys or D-Cys
  misc_feature (15)..(15): Xaa can be Cys or D-Cys
AACCEWXCTPACTGXK

SEQ ID NO: 2156 - protein, 16 aa, Artificial Sequence
  Synthetically generated peptide
  misc_feature (7)..(7): Xaa can be Cys or D-Cys
  misc_feature (15)..(15): Xaa can be Cys or D-Cys
AACCEWXCTPACTGXY

SEQ ID NO: 2157 - protein, 15 aa, Artificial Sequence
  Synthetically generated peptide
  misc_feature (3)..(3): Xaa can be Cys or D-Cys
AAXCEVCCNPACTGC

SEQ ID NO: 2158 - protein, 16 aa, Artificial Sequence
  Synthetically generated peptide
  misc_feature (3)..(3): Xaa can be Cys or D-Cys
AAXCEVCCNPACTGCK

SEQ ID NO: 2159 - protein, 16 aa, Artificial Sequence
  Synthetically generated peptide
  misc_feature (3)..(3): Xaa can be Cys or D-Cys
AAXCEVCCNPACTGCY

SEQ ID NO: 2160 - protein, 15 aa, Artificial Sequence
  Synthetically generated peptide
  misc_feature (3)..(3): Xaa can be Cys or D-Cys
  misc_feature (15)..(15): Xaa can be Cys or D-Cys
AAXCEVCCNPACTGX

SEQ ID NO: 2161 - protein, 16 aa, Artificial Sequence
  Synthetically generated peptide
  misc_feature (3)..(3): Xaa can be Cys or D-Cys
  misc_feature (15)..(15): Xaa can be Cys or D-Cys
AAXCEVCCNPACTGXK

SEQ ID NO: 2162 - protein, 16 aa, Artificial Sequence
  Synthetically generated peptide
  misc_feature (3)..(3): Xaa can be Cys or D-Cys
  misc_feature (15)..(15): Xaa can be Cys or D-Cys
AAXCEVCCNPACTGXY

SEQ ID NO: 2163 - protein, 15 aa, Artificial Sequence
  Synthetically generated peptide
  misc_feature (3)..(3): Xaa can be Cys or D-Cys
AAXCEVCCTPACTGC

SEQ ID NO: 2164 - protein, 16 aa, Artificial Sequence
  Synthetically generated peptide
  misc_feature (3)..(3): Xaa can be Cys or D-Cys
AAXCEVCCTPACTGCK

SEQ ID NO: 2165 - protein, 16 aa, Artificial Sequence
  Synthetically generated peptide
  misc_feature (3)..(3): Xaa can be Cys or D-Cys
AAXCEVCCTPACTGCY

SEQ ID NO: 2166 - protein, 15 aa, Artificial Sequence
  Synthetically generated peptide
  misc_feature (3)..(3): Xaa can be Cys or D-Cys
  misc_feature (15)..(15): Xaa can be Cys or D-Cys
AAXCEVCCTPACTGX

SEQ ID NO: 2167 - protein, 16 aa, Artificial Sequence
  Synthetically generated peptide
  misc_feature (3)..(3): Xaa can be Cys or D-Cys
  misc_feature (15)..(15): Xaa can be Cys or D-Cys
AAXCEVCCTPACTGXK

SEQ ID NO: 2168 - protein, 16 aa, Artificial Sequence
  Synthetically generated peptide
  misc_feature (3)..(3): Xaa can be Cys or D-Cys
  misc_feature (15)..(15): Xaa can be Cys or D-Cys
AAXCEVCCTPACTGXY

SEQ ID NO: 2169 - protein, 15 aa, Artificial Sequence
  Synthetically generated peptide
  misc_feature (3)..(3): Xaa can be Cys or D-Cys
  misc_feature (7)..(7): Xaa can be Cys or D-Cys
AAXCEVXCNPACTGC

SEQ ID NO: 2170 - protein, 16 aa, Artificial Sequence
  Synthetically generated peptide
  misc_feature (3)..(3): Xaa can be Cys or D-Cys
  misc_feature (7)..(7): Xaa can be Cys or D-Cys
AAXCEVXCNPACTGCK

SEQ ID NO: 2171 - protein, 16 aa, Artificial Sequence
  Synthetically generated peptide
  misc_feature (3)..(3): Xaa can be Cys or D-Cys
  misc_feature (7)..(7): Xaa can be Cys or D-Cys
AAXCEVXCNPACTGCY

SEQ ID NO: 2172 - protein, 15 aa, Artificial Sequence
  Synthetically generated peptide
  misc_feature (3)..(3): Xaa can be Cys or D-Cys
  misc_feature (7)..(7): Xaa can be Cys or D-Cys
  misc_feature (15)..(15): Xaa can be Cys or D-Cys
AAXCEVXCNPACTGX

SEQ ID NO: 2173 - protein, 16 aa, Artificial Sequence
  Synthetically generated peptide
  misc_feature (3)..(3): Xaa can be Cys or D-Cys
  misc_feature (7)..(7): Xaa can be Cys or D-Cys
  misc_feature (15)..(15): Xaa can be Cys or D-Cys
AAXCEVXCNPACTGXK

SEQ ID NO: 2174 - protein, 16 aa, Artificial Sequence
  Synthetically generated peptide
  misc_feature (3)..(3): Xaa can be Cys or D-Cys
  misc_feature (7)..(7): Xaa can be Cys or D-Cys
  misc_feature (15)..(15): Xaa can be Cys or D-Cys
AAXCEVXCNPACTGXY

SEQ ID NO: 2175 - protein, 15 aa, Artificial Sequence
  Synthetically generated peptide
  misc_feature (3)..(3): Xaa can be Cys or D-Cys
  misc_feature (7)..(7): Xaa can be Cys or D-Cys
AAXCEVXCTPACTGC

SEQ ID NO: 2176 - protein, 16 aa, Artificial Sequence
  Synthetically generated peptide
  misc_feature (3)..(3): Xaa can be Cys or D-Cys
  misc_feature (7)..(7): Xaa can be Cys or D-Cys
AAXCEVXCTPACTGCK

SEQ ID NO: 2177 - protein, 16 aa, Artificial Sequence
  Synthetically generated peptide
  misc_feature (3)..(3): Xaa can be Cys or D-Cys
  misc_feature (7)..(7): Xaa can be Cys or D-Cys
AAXCEVXCTPACTGCY

SEQ ID NO: 2178 - protein, 15 aa, Artificial Sequence
  Synthetically generated peptide
  misc_feature (3)..(3): Xaa can be Cys or D-Cys
  misc_feature (7)..(7): Xaa can be Cys or D-Cys
  misc_feature (15)..(15): Xaa can be Cys or D-Cys
AAXCEVXCTPACTGX

SEQ ID NO: 2179 - protein, 16 aa, Artificial Sequence
  Synthetically generated peptide
  misc_feature (3)..(3): Xaa can be Cys or D-Cys
  misc_feature (7)..(7): Xaa can be Cys or D-Cys
  misc_feature (15)..(15): Xaa can be Cys or D-Cys
AAXCEVXCTPACTGXK

SEQ ID NO: 2180 - protein, 16 aa, Artificial Sequence
  Synthetically generated peptide
  misc_feature (3)..(3): Xaa can be Cys or D-Cys
  misc_feature (7)..(7): Xaa can be Cys or D-Cys
  misc_feature (15)..(15): Xaa can be Cys or D-Cys
AAXCEVXCTPACTGXY

SEQ ID NO: 2181 - protein, 15 aa, Artificial Sequence
  Synthetically generated peptide
  misc_feature (3)..(3): Xaa can be Cys or D-Cys
AAXCEICCNPACTGC

SEQ ID NO: 2182 - protein, 16 aa, Artificial Sequence
  Synthetically generated peptide
  misc_feature (3)..(3): Xaa can be Cys or D-Cys
AAXCEICCNPACTGCK

SEQ ID NO: 2183 - protein, 16 aa, Artificial Sequence
  Synthetically generated peptide
  misc_feature (3)..(3): Xaa can be Cys or D-Cys
AAXCEICCNPACTGCY

SEQ ID NO: 2184 - protein, 15 aa, Artificial Sequence
  Synthetically generated peptide
  misc_feature (3)..(3): Xaa can be Cys or D-Cys
  misc_feature (15)..(15): Xaa can be Cys or D-Cys
AAXCEICCNPACTGX

SEQ ID NO: 2185 - protein, 16 aa, Artificial Sequence
  Synthetically generated peptide
  misc_feature (3)..(3): Xaa can be Cys or D-Cys
  misc_feature (15)..(15): Xaa can be Cys or D-Cys
AAXCEICCNPACTGXK

SEQ ID NO: 2186 - protein, 16 aa, Artificial Sequence
  Synthetically generated peptide
  misc_feature (3)..(3): Xaa can be Cys or D-Cys
  misc_feature (15)..(15): Xaa can be Cys or D-Cys
AAXCEICCNPACTGXY

SEQ ID NO: 2187 - protein, 15 aa, Artificial Sequence
  Synthetically generated peptide
  misc_feature (3)..(3): Xaa can be Cys or D-Cys
AAXCEICCTPACTGC

SEQ ID NO: 2188 - protein, 16 aa, Artificial Sequence
  Synthetically generated peptide
  misc_feature (3)..(3): Xaa can be Cys or D-Cys
AAXCEICCTPACTGCK

SEQ ID NO: 2189 - protein, 16 aa, Artificial Sequence
  Synthetically generated peptide
  misc_feature (3)..(3): Xaa can be Cys or D-Cys
AAXCEICCTPACTGCY

SEQ ID NO: 2190 - protein, 15 aa, Artificial Sequence
  Synthetically generated peptide
  misc_feature (3)..(3): Xaa can be Cys or D-Cys
  misc_feature (15)..(15): Xaa can be Cys or D-Cys
AAXCEICCTPACTGX

SEQ ID NO: 2191 - protein, 16 aa, Artificial Sequence
  Synthetically generated peptide
  misc_feature (3)..(3): Xaa can be Cys or D-Cys
  misc_feature (15)..(15): Xaa can be Cys or D-Cys
AAXCEICCTPACTGXK

SEQ ID NO: 2192 - protein, 16 aa, Artificial Sequence
  Synthetically generated peptide
  misc_feature (3)..(3): Xaa can be Cys or D-Cys
  misc_feature (15)..(15): Xaa can be Cys or D-Cys
AAXCEICCTPACTGXY

SEQ ID NO: 2193 - protein, 15 aa, Artificial Sequence
  Synthetically generated peptide
  misc_feature (3)..(3): Xaa can be Cys or D-Cys
  misc_feature (7)..(7): Xaa can be Cys or D-Cys
AAXCEIXCNPACTGC

SEQ ID NO: 2194 - protein, 16 aa, Artificial Sequence
  Synthetically generated peptide
  misc_feature (3)..(3): Xaa can be Cys or D-Cys
  misc_feature (7)..(7): Xaa can be Cys or D-Cys
AAXCEIXCNPACTGCK

SEQ ID NO: 2195 - protein, 16 aa, Artificial Sequence
  Synthetically generated peptide
  misc_feature (3)..(3): Xaa can be Cys or D-Cys
  misc_feature (7)..(7): Xaa can be Cys or D-Cys
AAXCEIXCNPACTGCY

SEQ ID NO: 2196 - protein, 15 aa, Artificial Sequence
  Synthetically generated peptide
  misc_feature (3)..(3): Xaa can be Cys or D-Cys
  misc_feature (7)..(7): Xaa can be Cys or D-Cys
  misc_feature (15)..(15): Xaa can be Cys or D-Cys
AAXCEIXCNPACTGX

SEQ ID NO: 2197 - protein, 16 aa, Artificial Sequence
  Synthetically generated peptide
  misc_feature (3)..(3): Xaa can be Cys or D-Cys
  misc_feature (7)..(7): Xaa can be Cys or D-Cys
  misc_feature (15)..(15): Xaa can be Cys or D-Cys
AAXCEIXCNPACTGXK

SEQ ID NO: 2198 - protein, 16 aa, Artificial Sequence
  Synthetically generated peptide
  misc_feature (3)..(3): Xaa can be Cys or D-Cys
  misc_feature (7)..(7): Xaa can be Cys or D-Cys
  misc_feature (15)..(15): Xaa can be Cys or D-Cys
AAXCEIXCNPACTGXY

SEQ ID NO: 2199 - protein, 15 aa, Artificial Sequence
  Synthetically generated peptide
  misc_feature (3)..(3): Xaa can be Cys or D-Cys
  misc_feature (7)..(7): Xaa can be Cys or D-Cys
AAXCEIXCTPACTGC

SEQ ID NO: 2200 - protein, 16 aa, Artificial Sequence
  Synthetically generated peptide
  misc_feature (3)..(3): Xaa can be Cys or D-Cys
  misc_feature (7)..(7): Xaa can be Cys or D-Cys
AAXCEIXCTPACTGCK

SEQ ID NO: 2201 - protein, 16 aa, Artificial Sequence
  Synthetically generated peptide
  misc_feature (3)..(3): Xaa can be Cys or D-Cys
  misc_feature (7)..(7): Xaa can be Cys or D-Cys
AAXCEIXCTPACTGCY

SEQ ID NO: 2202 - protein, 15 aa, Artificial Sequence
  Synthetically generated peptide
  misc_feature (3)..(3): Xaa can be Cys or D-Cys
  misc_feature (7)..(7): Xaa can be Cys or D-Cys
  misc_feature (15)..(15): Xaa can be Cys or D-Cys
AAXCEIXCTPACTGX

SEQ ID NO: 2203 - protein, 16 aa, Artificial Sequence
  Synthetically generated peptide
  misc_feature (3)..(3): Xaa can be Cys or D-Cys
  misc_feature (7)..(7): Xaa can be Cys or D-Cys
  misc_feature (15)..(15): Xaa can be Cys or D-Cys
AAXCEIXCTPACTGXK

SEQ ID NO: 2204 - protein, 16 aa, Artificial Sequence
  Synthetically generated peptide
  misc_feature (3)..(3): Xaa can be Cys or D-Cys
  misc_feature (7)..(7): Xaa can be Cys or D-Cys
  misc_feature (15)..(15): Xaa can be Cys or D-Cys
AAXCEIXCTPACTGXY

SEQ ID NO: 2205 - protein, 15 aa, Artificial Sequence
  Synthetically generated peptide
  misc_feature (3)..(3): Xaa can be Cys or D-Cys
AAXCELCCNPACTGC

SEQ ID NO: 2206 - protein, 16 aa, Artificial Sequence
  Synthetically generated peptide
  misc_feature (3)..(3): Xaa can be Cys or D-Cys
AAXCELCCNPACTGCK

SEQ ID NO: 2207 - protein, 16 aa, Artificial Sequence
  Synthetically generated peptide
  misc_feature (3)..(3): Xaa can be Cys or D-Cys
AAXCELCCNPACTGCY

SEQ ID NO: 2208 - protein, 15 aa, Artificial Sequence
  Synthetically generated peptide
  misc_feature (3)..(3): Xaa can be Cys or D-Cys
  misc_feature (15)..(15): Xaa can be Cys or D-Cys
AAXCELCCNPACTGX

SEQ ID NO: 2209 - protein, 16 aa, Artificial Sequence
  Synthetically generated peptide
  misc_feature (3)..(3): Xaa can be Cys or D-Cys
  misc_feature (15)..(15): Xaa can be Cys or D-Cys
AAXCELCCNPACTGXK

SEQ ID NO: 2210 - protein, 16 aa, Artificial Sequence
  Synthetically generated peptide
  misc_feature (3)..(3): Xaa can be Cys or D-Cys
  misc_feature (15)..(15): Xaa can be Cys or D-Cys
AAXCELCCNPACTGXY

SEQ ID NO: 2211 - protein, 15 aa, Artificial Sequence
  Synthetically generated peptide
  misc_feature (3)..(3): Xaa can be Cys or D-Cys
AAXCELCCTPACTGC

SEQ ID NO: 2212 - protein, 16 aa, Artificial Sequence
  Synthetically generated peptide
  misc_feature (3)..(3): Xaa can be Cys or D-Cys
AAXCELCCTPACTGCK

SEQ ID NO: 2213 - protein, 16 aa, Artificial Sequence
  Synthetically generated peptide
  misc_feature (3)..(3): Xaa can be Cys or D-Cys
AAXCELCCTPACTGCY

SEQ ID NO: 2214 - protein, 15 aa, Artificial Sequence
  Synthetically generated peptide
  misc_feature (3)..(3): Xaa can be Cys or D-Cys
  misc_feature (15)..(15): Xaa can be Cys or D-Cys
AAXCELCCTPACTGX

SEQ ID NO: 2215 - protein, 16 aa, Artificial Sequence
  Synthetically generated peptide
  misc_feature (3)..(3): Xaa can be Cys or D-Cys
  misc_feature (15)..(15): Xaa can be Cys or D-Cys
AAXCELCCTPACTGXK

SEQ ID NO: 2216 - protein, 16 aa, Artificial Sequence
  Synthetically generated peptide
  misc_feature (3)..(3): Xaa can be Cys or D-Cys
  misc_feature (15)..(15): Xaa can be Cys or D-Cys
AAXCELCCTPACTGXY

SEQ ID NO: 2217 - protein, 15 aa, Artificial Sequence
  Synthetically generated peptide
  misc_feature (3)..(3): Xaa can be Cys or D-Cys
  misc_feature (7)..(7): Xaa can be Cys or D-Cys
AAXCELXCNPACTGC

SEQ ID NO: 2218 - protein, 16 aa, Artificial Sequence
  Synthetically generated peptide
  misc_feature (3)..(3): Xaa can be Cys or D-Cys
  misc_feature (7)..(7): Xaa can be Cys or D-Cys
AAXCELXCNPACTGCK

SEQ ID NO: 2219 - protein, 16 aa, Artificial Sequence
  Synthetically generated peptide
  misc_feature (3)..(3): Xaa can be Cys or D-Cys
  misc_feature (7)..(7): Xaa can be Cys or D-Cys
AAXCELXCNPACTGCY

SEQ ID NO: 2220 - protein, 15 aa, Artificial Sequence
  Synthetically generated peptide
  misc_feature (3)..(3): Xaa can be Cys or D-Cys
  misc_feature (7)..(7): Xaa can be Cys or D-Cys
  misc_feature (15)..(15): Xaa can be Cys or D-Cys
AAXCELXCNPACTGX

SEQ ID NO: 2221 - protein, 16 aa, Artificial Sequence
  Synthetically generated peptide
  misc_feature (3)..(3): Xaa can be Cys or D-Cys
  misc_feature (7)..(7): Xaa can be Cys or D-Cys
  misc_feature (15)..(15): Xaa can be Cys or D-Cys
AAXCELXCNPACTGXK

SEQ ID NO: 2222 - protein, 16 aa, Artificial Sequence
  Synthetically generated peptide
  misc_feature (3)..(3): Xaa can be Cys or D-Cys
  misc_feature (7)..(7): Xaa can be Cys or D-Cys
  misc_feature (15)..(15): Xaa can be Cys or D-Cys
AAXCELXCNPACTGXY

SEQ ID NO: 2223 - protein, 15 aa, Artificial Sequence
  Synthetically generated peptide
  misc_feature (3)..(3): Xaa can be Cys or D-Cys
  misc_feature (7)..(7): Xaa can be Cys or D-Cys
AAXCELXCTPACTGC

SEQ ID NO: 2224 - protein, 16 aa, Artificial Sequence
  Synthetically generated peptide
  misc_feature (3)..(3): Xaa can be Cys or D-Cys
  misc_feature (7)..(7): Xaa can be Cys or D-Cys
AAXCELXCTPACTGCK

SEQ ID NO: 2225 - protein, 16 aa, Artificial Sequence
  Synthetically generated peptide
  misc_feature (3)..(3): Xaa can be Cys or D-Cys
  misc_feature (7)..(7): Xaa can be Cys or D-Cys
AAXCELXCTPACTGCY

SEQ ID NO: 2226 - protein, 15 aa, Artificial Sequence
  Synthetically generated peptide
  misc_feature (3)..(3): Xaa can be Cys or D-Cys
  misc_feature (7)..(7): Xaa can be Cys or D-Cys
  misc_feature (15)..(15): Xaa can be Cys or D-Cys
AAXCELXCTPACTGX

SEQ ID NO: 2227 - protein, 16 aa, Artificial Sequence
  Synthetically generated peptide
  misc_feature (3)..(3): Xaa can be Cys or D-Cys
  misc_feature (7)..(7): Xaa can be Cys or D-Cys
  misc_feature (15)..(15): Xaa can be Cys or D-Cys
AAXCELXCTPACTGXK

SEQ ID NO: 2228 - protein, 16 aa, Artificial Sequence
  Synthetically generated peptide
  misc_feature (3)..(3): Xaa can be Cys or D-Cys
  misc_feature (7)..(7): Xaa can be Cys or D-Cys
  misc_feature (15)..(15): Xaa can be Cys or D-Cys
AAXCELXCTPACTGXY

SEQ ID NO: 2229 - protein, 15 aa, Artificial Sequence
  Synthetically generated peptide
  misc_feature (3)..(3): Xaa can be Cys or D-Cys
AAXCEYCCNPACTGC

SEQ ID NO: 2230 - protein, 16 aa, Artificial Sequence
  Synthetically generated peptide
  misc_feature (3)..(3): Xaa can be Cys or D-Cys
AAXCEYCCNPACTGCK

SEQ ID NO: 2231 - protein, 16 aa, Artificial Sequence
  Synthetically generated peptide
  misc_feature (3)..(3): Xaa can be Cys or D-Cys
AAXCEYCCNPACTGCY

SEQ ID NO: 2232 - protein, 15 aa, Artificial Sequence
  Synthetically generated peptide
  misc_feature (3)..(3): Xaa can be Cys or D-Cys
  misc_feature (15)..(15): Xaa can be Cys or D-Cys
AAXCEYCCNPACTGX

SEQ ID NO: 2233 - protein, 16 aa, Artificial Sequence
  Synthetically generated peptide
  misc_feature (3)..(3): Xaa can be Cys or D-Cys
  misc_feature (15)..(15): Xaa can be Cys or D-Cys
AAXCEYCCNPACTGXK

SEQ ID NO: 2234 - protein, 16 aa, Artificial Sequence
  Synthetically generated peptide
  misc_feature (3)..(3): Xaa can be Cys or D-Cys
  misc_feature (15)..(15): Xaa can be Cys or D-Cys
AAXCEYCCNPACTGXY

SEQ ID NO: 2235 - protein, 15 aa, Artificial Sequence
  Synthetically generated peptide
  misc_feature (3)..(3): Xaa can be Cys or D-Cys
AAXCEYCCTPACTGC

SEQ ID NO: 2236 - protein, 16 aa, Artificial Sequence
  Synthetically generated peptide
  misc_feature (3)..(3): Xaa can be Cys or D-Cys
AAXCEYCCTPACTGCK

SEQ ID NO: 2237 - protein, 16 aa, Artificial Sequence
  Synthetically generated peptide
  misc_feature (3)..(3): Xaa can be Cys or D-Cys
AAXCEYCCTPACTGCY

SEQ ID NO: 2238 - protein, 15 aa, Artificial Sequence
  Synthetically generated peptide
  misc_feature (3)..(3): Xaa can be Cys or D-Cys
  misc_feature (15)..(15): Xaa can be Cys or D-Cys
AAXCEYCCTPACTGX

SEQ ID NO: 2239 - protein, 16 aa, Artificial Sequence
  Synthetically generated peptide
  misc_feature (3)..(3): Xaa can be Cys or D-Cys
  misc_feature (15)..(15): Xaa can be Cys or D-Cys
AAXCEYCCTPACTGXK

SEQ ID NO: 2240 - protein, 16 aa, Artificial Sequence
  Synthetically generated peptide
  misc_feature (3)..(3): Xaa can be Cys or D-Cys
  misc_feature (15)..(15): Xaa can be Cys or D-Cys
AAXCEYCCTPACTGXY

SEQ ID NO: 2241 - protein, 15 aa, Artificial Sequence
  Synthetically generated peptide
  misc_feature (3)..(3): Xaa can be Cys or D-Cys
  misc_feature (7)..(7): Xaa can be Cys or D-Cys
AAXCEYXCNPACTGC

SEQ ID NO: 2242 - protein, 16 aa, Artificial Sequence
  Synthetically generated peptide
  misc_feature (3)..(3): Xaa can be Cys or D-Cys
  misc_feature (7)..(7): Xaa can be Cys or D-Cys
AAXCEYXCNPACTGCK

SEQ ID NO: 2243 - protein, 16 aa, Artificial Sequence
  Synthetically generated peptide
  misc_feature (3)..(3): Xaa can be Cys or D-Cys
  misc_feature (7)..(7): Xaa can be Cys or D-Cys
AAXCEYXCNPACTGCY

SEQ ID NO: 2244 - protein, 15 aa, Artificial Sequence
  Synthetically generated peptide
  misc_feature (3)..(3): Xaa can be Cys or D-Cys
  misc_feature (7)..(7): Xaa can be Cys or D-Cys
  misc_feature (15)..(15): Xaa can be Cys or D-Cys
AAXCEYXCNPACTGX

SEQ ID NO: 2245 - protein, 16 aa, Artificial Sequence
  Synthetically generated peptide
  misc_feature (3)..(3): Xaa can be Cys or D-Cys
  misc_feature (7)..(7): Xaa can be Cys or D-Cys
  misc_feature (15)..(15): Xaa can be Cys or D-Cys
AAXCEYXCNPACTGXK

SEQ ID NO: 2246 - protein, 16 aa, Artificial Sequence
  Synthetically generated peptide
  misc_feature (3)..(3): Xaa can be Cys or D-Cys
  misc_feature (7)..(7): Xaa can be Cys or D-Cys
  misc_feature (15)..(15): Xaa can be Cys or D-Cys
AAXCEYXCNPACTGXY

SEQ ID NO: 2247 - protein, 15 aa, Artificial Sequence
  Synthetically generated peptide
  misc_feature (3)..(3): Xaa can be Cys or D-Cys
  misc_feature (7)..(7): Xaa can be Cys or D-Cys
AAXCEYXCTPACTGC

SEQ ID NO: 2248 - protein, 16 aa, Artificial Sequence
  Synthetically generated peptide
  misc_feature (3)..(3): Xaa can be Cys or D-Cys
  misc_feature (7)..(7): Xaa can be Cys or D-Cys
AAXCEYXCTPACTGCK

SEQ ID NO: 2249 - protein, 16 aa, Artificial Sequence
  Synthetically generated peptide
  misc_feature (3)..(3): Xaa can be Cys or D-Cys
  misc_feature (7)..(7): Xaa can be Cys or D-Cys
AAXCEYXCTPACTGCY

SEQ ID NO: 2250 - protein, 15 aa, Artificial Sequence
  Synthetically generated peptide
  misc_feature (3)..(3): Xaa can be Cys or D-Cys
  misc_feature (7)..(7): Xaa can be Cys or D-Cys
  misc_feature (15)..(15): Xaa can be Cys or D-Cys
AAXCEYXCTPACTGX

SEQ ID NO: 2251 - protein, 16 aa, Artificial Sequence
  Synthetically generated peptide
  misc_feature (3)..(3): Xaa can be Cys or D-Cys
  misc_feature (7)..(7): Xaa can be Cys or D-Cys
  misc_feature (15)..(15): Xaa can be Cys or D-Cys
AAXCEYXCTPACTGXK

SEQ ID NO: 2252 - protein, 16 aa, Artificial Sequence
  Synthetically generated peptide
  misc_feature (3)..(3): Xaa can be Cys or D-Cys
  misc_feature (7)..(7): Xaa can be Cys or D-Cys
  misc_feature (15)..(15): Xaa can be Cys or D-Cys
AAXCEYXCTPACTGXY

SEQ ID NO: 2253 - protein, 15 aa, Artificial Sequence
  Synthetically generated peptide
  misc_feature (3)..(3): Xaa can be Cys or D-Cys
AAXCEFCCNPACTGC

SEQ ID NO: 2254 - protein, 16 aa, Artificial Sequence
  Synthetically generated peptide
  misc_feature (3)..(3): Xaa can be Cys or D-Cys
AAXCEFCCNPACTGCK

SEQ ID NO: 2255 - protein, 16 aa, Artificial Sequence
  Synthetically generated peptide
  misc_feature (3)..(3): Xaa can be Cys or D-Cys
AAXCEFCCNPACTGCY

SEQ ID NO: 2256 - protein, 15 aa, Artificial Sequence
  Synthetically generated peptide
  misc_feature (3)..(3): Xaa can be Cys or D-Cys
  misc_feature (15)..(15): Xaa can be Cys or D-Cys
AAXCEFCCNPACTGX

SEQ ID NO: 2257 - protein, 16 aa, Artificial Sequence
  Synthetically generated peptide
  misc_feature (3)..(3): Xaa can be Cys or D-Cys
  misc_feature (15)..(15): Xaa can be Cys or D-Cys
AAXCEFCCNPACTGXK

SEQ ID NO: 2258 - protein, 16 aa, Artificial Sequence
  Synthetically generated peptide
  misc_feature (3)..(3): Xaa can be Cys or D-Cys
  misc_feature (15)..(15): Xaa can be Cys or D-Cys
AAXCEFCCNPACTGXY

SEQ ID NO: 2259 - protein, 15 aa, Artificial Sequence
  Synthetically generated peptide
  misc_feature (3)..(3): Xaa can be Cys or D-Cys
AAXCEFCCTPACTGC

SEQ ID NO: 2260 - protein, 16 aa, Artificial Sequence
  Synthetically generated peptide
  misc_feature (3)..(3): Xaa can be Cys or D-Cys
AAXCEFCCTPACTGCK

SEQ ID NO: 2261 - protein, 16 aa, Artificial Sequence
  Synthetically generated peptide
  misc_feature (3)..(3): Xaa can be Cys or D-Cys
AAXCEFCCTPACTGCY

SEQ ID NO: 2262 - protein, 15 aa, Artificial Sequence
  Synthetically generated peptide
  misc_feature (3)..(3): Xaa can be Cys or D-Cys
  misc_feature (15)..(15): Xaa can be Cys or D-Cys
AAXCEFCCTPACTGX

SEQ ID NO: 2263 - protein, 16 aa, Artificial Sequence
  Synthetically generated peptide
  misc_feature (3)..(3): Xaa can be Cys or D-Cys
  misc_feature (15)..(15): Xaa can be Cys or D-Cys
AAXCEFCCTPACTGXK

SEQ ID NO: 2264 - protein, 16 aa, Artificial Sequence
  Synthetically generated peptide
  misc_feature (3)..(3): Xaa can be Cys or D-Cys
  misc_feature (15)..(15): Xaa can be Cys or D-Cys
AAXCEFCCTPACTGXY

SEQ ID NO: 2265 - protein, 15 aa, Artificial Sequence
  Synthetically generated peptide
  misc_feature (3)..(3): Xaa can be Cys or D-Cys
  misc_feature (7)..(7): Xaa can be Cys or D-Cys
AAXCEFXCNPACTGC

SEQ ID NO: 2266 - protein, 16 aa, Artificial Sequence
  Synthetically generated peptide
  misc_feature (3)..(3): Xaa can be Cys or D-Cys
  misc_feature (7)..(7): Xaa can be Cys or D-Cys
AAXCEFXCNPACTGCK

SEQ ID NO: 2267 - protein, 16 aa, Artificial Sequence
  Synthetically generated peptide
  misc_feature (3)..(3): Xaa can be Cys or D-Cys
  misc_feature (7)..(7): Xaa can be Cys or D-Cys
AAXCEFXCNPACTGCY

SEQ ID NO: 2268 - protein, 15 aa, Artificial Sequence
  Synthetically generated peptide
  misc_feature (3)..(3): Xaa can be Cys or D-Cys
  misc_feature (7)..(7): Xaa can be Cys or D-Cys
  misc_feature (15)..(15): Xaa can be Cys or D-Cys
AAXCEFXCNPACTGX

SEQ ID NO: 2269 - protein, 16 aa, Artificial Sequence
  Synthetically generated peptide
  misc_feature (3)..(3): Xaa can be Cys or D-Cys
  misc_feature (7)..(7): Xaa can be Cys or D-Cys
  misc_feature (15)..(15): Xaa can be Cys or D-Cys
AAXCEFXCNPACTGXK

SEQ ID NO: 2270 - protein, 16 aa, Artificial Sequence
  Synthetically generated peptide
  misc_feature (3)..(3): Xaa can be Cys or D-Cys
  misc_feature (7)..(7): Xaa can be Cys or D-Cys
  misc_feature (15)..(15): Xaa can be Cys or D-Cys
AAXCEFXCNPACTGXY

SEQ ID NO: 2271 - protein, 15 aa, Artificial Sequence
  Synthetically generated peptide
  misc_feature (3)..(3): Xaa can be Cys or D-Cys
  misc_feature (7)..(7): Xaa can be Cys or D-Cys
AAXCEFXCTPACTGC

SEQ ID NO: 2272 - protein, 16 aa, Artificial Sequence
  Synthetically generated peptide
  misc_feature (3)..(3): Xaa can be Cys or D-Cys
  misc_feature (7)..(7): Xaa can be Cys or D-Cys
AAXCEFXCTPACTGCK

SEQ ID NO: 2273 - protein, 16 aa, Artificial Sequence
  Synthetically generated peptide
  misc_feature (3)..(3): Xaa can be Cys or D-Cys
  misc_feature (7)..(7): Xaa can be Cys or D-Cys
AAXCEFXCTPACTGCY

SEQ ID NO: 2274 - protein, 15 aa, Artificial Sequence
  Synthetically generated peptide
  misc_feature (3)..(3): Xaa can be Cys or D-Cys
  misc_feature (7)..(7): Xaa can be Cys or D-Cys
  misc_feature (15)..(15): Xaa can be Cys or D-Cys
AAXCEFXCTPACTGX

SEQ ID NO: 2275 - protein, 16 aa, Artificial Sequence
  Synthetically generated peptide
  misc_feature (3)..(3): Xaa can be Cys or D-Cys
  misc_feature (7)..(7): Xaa can be Cys or D-Cys
  misc_feature (15)..(15): Xaa can be Cys or D-Cys
AAXCEFXCTPACTGXK

SEQ ID NO: 2276 - protein, 16 aa, Artificial Sequence
  Synthetically generated peptide
  misc_feature (3)..(3): Xaa can be Cys or D-Cys
  misc_feature (7)..(7): Xaa can be Cys or D-Cys
  misc_feature (15)..(15): Xaa can be Cys or D-Cys
AAXCEFXCTPACTGXY

SEQ ID NO: 2277 - protein, 15 aa, Artificial Sequence
  Synthetically generated peptide
  misc_feature (3)..(3): Xaa can be Cys or D-Cys
AAXCEWCCNPACTGC

SEQ ID NO: 2278 - protein, 16 aa, Artificial Sequence
  Synthetically generated peptide
  misc_feature (3)..(3): Xaa can be Cys or D-Cys
AAXCEWCCNPACTGCK

SEQ ID NO: 2279 - protein, 16 aa, Artificial Sequence
  Synthetically generated peptide
  misc_feature (3)..(3): Xaa can be Cys or D-Cys
AAXCEWCCNPACTGCY

SEQ ID NO: 2280 - protein, 15 aa, Artificial Sequence
  Synthetically generated peptide
  misc_feature (3)..(3): Xaa can be Cys or D-Cys
  misc_feature (15)..(15): Xaa can be Cys or D-Cys
AAXCEWCCNPACTGX

SEQ ID NO: 2281 - protein, 16 aa, Artificial Sequence
  Synthetically generated peptide
  misc_feature (3)..(3): Xaa can be Cys or D-Cys
  misc_feature (15)..(15): Xaa can be Cys or D-Cys
AAXCEWCCNPACTGXK

SEQ ID NO: 2282 - protein, 16 aa, Artificial Sequence
  Synthetically generated peptide
  misc_feature (3)..(3): Xaa can be Cys or D-Cys
  misc_feature (15)..(15): Xaa can be Cys or D-Cys
AAXCEWCCNPACTGXY

SEQ ID NO: 2283 - protein, 15 aa, Artificial Sequence
  Synthetically generated peptide
  misc_feature (3)..(3): Xaa can be Cys or D-Cys
AAXCEWCCTPACTGC

SEQ ID NO: 2284 - protein, 16 aa, Artificial Sequence
  Synthetically generated peptide
  misc_feature (3)..(3): Xaa can be Cys or D-Cys
AAXCEWCCTPACTGCK

SEQ ID NO: 2285 - protein, 16 aa, Artificial Sequence
  Synthetically generated peptide
  misc_feature (3)..(3): Xaa can be Cys or D-Cys
AAXCEWCCTPACTGCY

SEQ ID NO: 2286 - protein, 15 aa, Artificial Sequence
  Synthetically generated peptide
  misc_feature (3)..(3): Xaa can be Cys or D-Cys
  misc_feature (15)..(15): Xaa can be Cys or D-Cys
AAXCEWCCTPACTGX

SEQ ID NO: 2287 - protein, 16 aa, Artificial Sequence
  Synthetically generated peptide
  misc_feature (3)..(3): Xaa can be Cys or D-Cys
  misc_feature (15)..(15): Xaa can be Cys or D-Cys
AAXCEWCCTPACTGXK

SEQ ID NO: 2288 - protein, 16 aa, Artificial Sequence
  Synthetically generated peptide
  misc_feature (3)..(3): Xaa can be Cys or D-Cys
  misc_feature (15)..(15): Xaa can be Cys or D-Cys
AAXCEWCCTPACTGXY

SEQ ID NO: 2289 - protein, 15 aa, Artificial Sequence
  Synthetically generated peptide
  misc_feature (3)..(3): Xaa can be Cys or D-Cys
  misc_feature (7)..(7): Xaa can be Cys or D-Cys
AAXCEWXCNPACTGC

SEQ ID NO: 2290 - protein, 16 aa, Artificial Sequence
  Synthetically generated peptide
  misc_feature (3)..(3): Xaa can be Cys or D-Cys
  misc_feature (7)..(7): Xaa can be Cys or D-Cys
AAXCEWXCNPACTGCK

SEQ ID NO: 2291 - protein, 16 aa, Artificial Sequence
  Synthetically generated peptide
  misc_feature (3)..(3): Xaa can be Cys or D-Cys
  misc_feature (7)..(7): Xaa can be Cys or D-Cys
AAXCEWXCNPACTGCY

SEQ ID NO: 2292 - protein, 15 aa, Artificial Sequence
  Synthetically generated peptide
  misc_feature (3)..(3): Xaa can be Cys or D-Cys
  misc_feature (7)..(7): Xaa can be Cys or D-Cys
  misc_feature (15)..(15): Xaa can be Cys or D-Cys
AAXCEWXCNPACTGX

SEQ ID NO: 2293 - protein, 16 aa, Artificial Sequence
  Synthetically generated peptide
  misc_feature (3)..(3): Xaa can be Cys or D-Cys
  misc_feature (7)..(7): Xaa can be Cys or D-Cys
  misc_feature (15)..(15): Xaa can be Cys or D-Cys
AAXCEWXCNPACTGXK

SEQ ID NO: 2294 - protein, 16 aa, Artificial Sequence
  Synthetically generated peptide
  misc_feature (3)..(3): Xaa can be Cys or D-Cys
  misc_feature (7)..(7): Xaa can be Cys or D-Cys
  misc_feature (15)..(15): Xaa can be Cys or D-Cys
AAXCEWXCNPACTGXY

SEQ ID NO: 2295 - protein, 15 aa, Artificial Sequence
  Synthetically generated peptide
  misc_feature (3)..(3): Xaa can be Cys or D-Cys
  misc_feature (7)..(7): Xaa can be Cys or D-Cys
AAXCEWXCTPACTGC

SEQ ID NO: 2296 - protein, 16 aa, Artificial Sequence
  Synthetically generated peptide
  misc_feature (3)..(3): Xaa can be Cys or D-Cys
  misc_feature (7)..(7): Xaa can be Cys or D-Cys
AAXCEWXCTPACTGCK

SEQ ID NO: 2297 - protein, 16 aa, Artificial Sequence
  Synthetically generated peptide
  misc_feature (3)..(3): Xaa can be Cys or D-Cys
  misc_feature (7)..(7): Xaa can be Cys or D-Cys
AAXCEWXCTPACTGCY

SEQ ID NO: 2298 - protein, 15 aa, Artificial Sequence
  Synthetically generated peptide
  misc_feature (3)..(3): Xaa can be Cys or D-Cys
  misc_feature (7)..(7): Xaa can be Cys or D-Cys
  misc_feature (15)..(15): Xaa can be Cys or D-Cys
AAXCEWXCTPACTGX

SEQ ID NO: 2299 - protein, 16 aa, Artificial Sequence
  Synthetically generated peptide
  misc_feature (3)..(3): Xaa can be Cys or D-Cys
  misc_feature (7)..(7): Xaa can be Cys or D-Cys
  misc_feature (15)..(15): Xaa can be Cys or D-Cys
AAXCEWXCTPACTGXK

SEQ ID NO: 2300 - protein, 16 aa, Artificial Sequence
  Synthetically generated peptide
  misc_feature (3)..(3): Xaa can be Cys or D-Cys
  misc_feature (7)..(7): Xaa can be Cys or D-Cys
  misc_feature (15)..(15): Xaa can be Cys or D-Cys
AAXCEWXCTPACTGXY

SEQ ID NO: 2301 - protein, 15 aa, Artificial Sequence
  Synthetically generated peptide
AGCCEVCCNPACTGC

SEQ ID NO: 2302 - protein, 16 aa, Artificial Sequence
  Synthetically generated peptide
AGCCEVCCNPACTGCK

SEQ ID NO: 2303 - protein, 16 aa, Artificial Sequence
  Synthetically generated peptide
AGCCEVCCNPACTGCY

SEQ ID NO: 2304 - protein, 15 aa, Artificial Sequence
  Synthetically generated peptide
  misc_feature (15)..(15): Xaa can be Cys or D-Cys
AGCCEVCCNPACTGX

SEQ ID NO: 2305 - protein, 16 aa, Artificial Sequence
  Synthetically generated peptide
  misc_feature (15)..(15): Xaa can be Cys or D-Cys
AGCCEVCCNPACTGXK

SEQ ID NO: 2306 - protein, 16 aa, Artificial Sequence
  Synthetically generated peptide
  misc_feature (15)..(15): Xaa can be Cys or D-Cys
AGCCEVCCNPACTGXY

SEQ ID NO: 2307 - protein, 15 aa, Artificial Sequence
  Synthetically generated peptide
AGCCEVCCTPACTGC

SEQ ID NO: 2308 - protein, 16 aa, Artificial Sequence
  Synthetically generated peptide
AGCCEVCCTPACTGCK

SEQ ID NO: 2309 - protein, 16 aa, Artificial Sequence
  Synthetically generated peptide
AGCCEVCCTPACTGCY

SEQ ID NO: 2310 - protein, 15 aa, Artificial Sequence
  Synthetically generated peptide
  misc_feature (15)..(15): Xaa can be Cys or D-Cys
AGCCEVCCTPACTGX

SEQ ID NO: 2311 - protein, 16 aa, Artificial Sequence
  Synthetically generated peptide
  misc_feature (15)..(15): Xaa can be Cys or D-Cys
AGCCEVCCTPACTGXK

SEQ ID NO: 2312 - protein, 16 aa, Artificial Sequence
  Synthetically generated peptide
  misc_feature (15)..(15): Xaa can be Cys or D-Cys
AGCCEVCCTPACTGXY

SEQ ID NO: 2313 - protein, 15 aa, Artificial Sequence
  Synthetically generated peptide
  misc_feature (7)..(7): Xaa can be Cys or D-Cys
AGCCEVXCNPACTGC

SEQ ID NO: 2314 - protein, 16 aa, Artificial Sequence
  Synthetically generated peptide
  misc_feature (7)..(7): Xaa can be Cys or D-Cys
AGCCEVXCNPACTGCK

SEQ ID NO: 2315 - protein, 16 aa, Artificial Sequence
  Synthetically generated peptide
  misc_feature (7)..(7): Xaa can be Cys or D-Cys
AGCCEVXCNPACTGCY

SEQ ID NO: 2316 - protein, 15 aa, Artificial Sequence
  Synthetically generated peptide
  misc_feature (7)..(7): Xaa can be Cys or D-Cys
  misc_feature (15)..(15): Xaa can be Cys or D-Cys
AGCCEVXCNPACTGX

SEQ ID NO: 2317 - protein, 16 aa, Artificial Sequence
  Synthetically generated peptide
  misc_feature (7)..(7): Xaa can be Cys or D-Cys
  misc_feature (15)..(15): Xaa can be Cys or D-Cys
AGCCEVXCNPACTGXK

SEQ ID NO: 2318 - protein, 16 aa, Artificial Sequence
  Synthetically generated peptide
  misc_feature (7)..(7): Xaa can be Cys or D-Cys
  misc_feature (15)..(15): Xaa can be Cys or D-Cys
AGCCEVXCNPACTGXY

SEQ ID NO: 2319 - protein, 15 aa, Artificial Sequence
  Synthetically generated peptide
  misc_feature (7)..(7): Xaa can be Cys or D-Cys
AGCCEVXCTPACTGC

SEQ ID NO: 2320 - protein, 16 aa, Artificial Sequence
  Synthetically generated peptide
  misc_feature (7)..(7): Xaa can be Cys or D-Cys
AGCCEVXCTPACTGCK

SEQ ID NO: 2321 - protein, 16 aa, Artificial Sequence
  Synthetically generated peptide
  misc_feature (7)..(7): Xaa can be Cys or D-Cys
AGCCEVXCTPACTGCY

SEQ ID NO: 2322 - protein, 15 aa, Artificial Sequence
  Synthetically generated peptide
  misc_feature (7)..(7): Xaa can be Cys or D-Cys
  misc_feature (15)..(15): Xaa can be Cys or D-Cys
AGCCEVXCTPACTGX

SEQ ID NO: 2323 - protein, 16 aa, Artificial Sequence
  Synthetically generated peptide
  misc_feature (7)..(7): Xaa can be Cys or D-Cys
  misc_feature (15)..(15): Xaa can be Cys or D-Cys
AGCCEVXCTPACTGXK

SEQ ID NO: 2324 - protein, 16 aa, Artificial Sequence
  Synthetically generated peptide
  misc_feature (7)..(7): Xaa can be Cys or D-Cys
  misc_feature (15)..(15): Xaa can be Cys or D-Cys
AGCCEVXCTPACTGXY

SEQ ID NO: 2325 - protein, 15 aa, Artificial Sequence
  Synthetically generated peptide
AGCCEICCNPACTGC

SEQ ID NO: 2326 - protein, 16 aa, Artificial Sequence
  Synthetically generated peptide
AGCCEICCNPACTGCK

SEQ ID NO: 2327 - protein, 16 aa, Artificial Sequence
  Synthetically generated peptide
AGCCEICCNPACTGCY

SEQ ID NO: 2328 - protein, 15 aa, Artificial Sequence
  Synthetically generated peptide
  misc_feature (15)..(15): Xaa can be Cys or D-Cys
AGCCEICCNPACTGX

SEQ ID NO: 2329 - protein, 16 aa, Artificial Sequence
  Synthetically generated peptide
  misc_feature (15)..(15): Xaa can be Cys or D-Cys
AGCCEICCNPACTGXK

SEQ ID NO: 2330 - protein, 16 aa, Artificial Sequence
  Synthetically generated peptide
  misc_feature (15)..(15): Xaa can be Cys or D-Cys
AGCCEICCNPACTGXY

SEQ ID NO: 2331 - protein, 15 aa, Artificial Sequence
  Synthetically generated peptide
AGCCEICCTPACTGC

SEQ ID NO: 2332 - protein, 16 aa, Artificial Sequence
  Synthetically generated peptide
AGCCEICCTPACTGCK

SEQ ID NO: 2333 - protein, 16 aa, Artificial Sequence
  Synthetically generated peptide
AGCCEICCTPACTGCY

SEQ ID NO: 2334 - protein, 15 aa, Artificial Sequence
  Synthetically generated peptide
  misc_feature (15)..(15): Xaa can be Cys or D-Cys
AGCCEICCTPACTGX

SEQ ID NO: 2335 - protein, 16 aa, Artificial Sequence
  Synthetically generated peptide
  misc_feature (15)..(15): Xaa can be Cys or D-Cys
AGCCEICCTPACTGXK

SEQ ID NO: 2336 - protein, 16 aa, Artificial Sequence
  Synthetically generated peptide
  misc_feature (15)..(15): Xaa can be Cys or D-Cys
AGCCEICCTPACTGXY

SEQ ID NO: 2337 - protein, 15 aa, Artificial Sequence
  Synthetically generated peptide
  misc_feature (7)..(7): Xaa can be Cys or D-Cys
AGCCEIXCNPACTGC

SEQ ID NO: 2338 - protein, 16 aa, Artificial Sequence
  Synthetically generated peptide
  misc_feature (7)..(7): Xaa can be Cys or D-Cys
AGCCEIXCNPACTGCK

SEQ ID NO: 2339 - protein, 16 aa, Artificial Sequence
  Synthetically generated peptide
  misc_feature (7)..(7): Xaa can be Cys or D-Cys
AGCCEIXCNPACTGCY

SEQ ID NO: 2340 - protein, 15 aa, Artificial Sequence
  Synthetically generated peptide
  misc_feature (7)..(7): Xaa can be Cys or D-Cys
  misc_feature (15)..(15): Xaa can be Cys or D-Cys
AGCCEIXCNPACTGX

SEQ ID NO: 2341 - protein, 16 aa, Artificial Sequence
  Synthetically generated peptide
  misc_feature (7)..(7): Xaa can be Cys or D-Cys
  misc_feature (15)..(15): Xaa can be Cys or D-Cys
AGCCEIXCNPACTGXK

SEQ ID NO: 2342 - protein, 16 aa, Artificial Sequence
  Synthetically generated peptide
  misc_feature (7)..(7): Xaa can be Cys or D-Cys
  misc_feature (15)..(15): Xaa can be Cys or D-Cys
AGCCEIXCNPACTGXY

SEQ ID NO: 2343 - protein, 15 aa, Artificial Sequence
  Synthetically generated peptide
  misc_feature (7)..(7): Xaa can be Cys or D-Cys
AGCCEIXCTPACTGC

SEQ ID NO: 2344 - protein, 16 aa, Artificial Sequence
  Synthetically generated peptide
  misc_feature (7)..(7): Xaa can be Cys or D-Cys
AGCCEIXCTPACTGCK

SEQ ID NO: 2345 - protein, 16 aa, Artificial Sequence
  Synthetically generated peptide
  misc_feature (7)..(7): Xaa can be Cys or D-Cys
AGCCEIXCTPACTGCY

SEQ ID NO: 2346 - protein, 15 aa, Artificial Sequence
  Synthetically generated peptide
  misc_feature (7)..(7): Xaa can be Cys or D-Cys
  misc_feature (15)..(15): Xaa can be Cys or D-Cys
AGCCEIXCTPACTGX

SEQ ID NO: 2347 - protein, 16 aa, Artificial Sequence
  Synthetically generated peptide
  misc_feature (7)..(7): Xaa can be Cys or D-Cys
  misc_feature (15)..(15): Xaa can be Cys or D-Cys
AGCCEIXCTPACTGXK

SEQ ID NO: 2348 - protein, 16 aa, Artificial Sequence
  Synthetically generated peptide
  misc_feature (7)..(7): Xaa can be Cys or D-Cys
  misc_feature (15)..(15): Xaa can be Cys or D-Cys
AGCCEIXCTPACTGXY

SEQ ID NO: 2349 - protein, 15 aa, Artificial Sequence
  Synthetically generated peptide
AGCCELCCNPACTGC

SEQ ID NO: 2350 - protein, 16 aa, Artificial Sequence
  Synthetically generated peptide
AGCCELCCNPACTGCK

SEQ ID NO: 2351 - protein, 16 aa, Artificial Sequence
  Synthetically generated peptide
AGCCELCCNPACTGCY

SEQ ID NO: 2352 - protein, 15 aa, Artificial Sequence
  Synthetically generated peptide
  misc_feature (15)..(15): Xaa can be Cys or D-Cys
AGCCELCCNPACTGX

SEQ ID NO: 2353 - protein, 16 aa, Artificial Sequence
  Synthetically generated peptide
  misc_feature (15)..(15): Xaa can be Cys or D-Cys
AGCCELCCNPACTGXK

SEQ ID NO: 2354 - protein, 16 aa, Artificial Sequence
  Synthetically generated peptide
  misc_feature (15)..(15): Xaa can be Cys or D-Cys
AGCCELCCNPACTGXY

SEQ ID NO: 2355 - protein, 15 aa, Artificial Sequence
  Synthetically generated peptide
AGCCELCCTPACTGC

SEQ ID NO: 2356 - protein, 16 aa, Artificial Sequence
  Synthetically generated peptide
AGCCELCCTPACTGCK

SEQ ID NO: 2357 - protein, 16 aa, Artificial Sequence
  Synthetically generated peptide
AGCCELCCTPACTGCY

SEQ ID NO: 2358 - protein, 15 aa, Artificial Sequence
  Synthetically generated peptide
  misc_feature (15)..(15): Xaa can be Cys or D-Cys
AGCCELCCTPACTGX

SEQ ID NO: 2359 - protein, 16 aa, Artificial Sequence
  Synthetically generated peptide
  misc_feature (15)..(15): Xaa can be Cys or D-Cys
AGCCELCCTPACTGXK

SEQ ID NO: 2360 - protein, 16 aa, Artificial Sequence
  Synthetically generated peptide
  misc_feature (15)..(15): Xaa can be Cys or D-Cys
AGCCELCCTPACTGXY

SEQ ID NO: 2361 - protein, 15 aa, Artificial Sequence
  Synthetically generated peptide
  misc_feature (7)..(7): Xaa can be Cys or D-Cys
AGCCELXCNPACTGC

SEQ ID NO: 2362 - protein, 16 aa, Artificial Sequence
  Synthetically generated peptide
  misc_feature (7)..(7): Xaa can be Cys or D-Cys
AGCCELXCNPACTGCK

SEQ ID NO: 2363 - protein, 16 aa, Artificial Sequence
  Synthetically generated peptide
  misc_feature (7)..(7): Xaa can be Cys or D-Cys
AGCCELXCNPACTGCY

SEQ ID NO: 2364 - protein, 15 aa, Artificial Sequence
  Synthetically generated peptide
  misc_feature (7)..(7): Xaa can be Cys or D-Cys
  misc_feature (15)..(15): Xaa can be Cys or D-Cys
AGCCELXCNPACTGX

SEQ ID NO: 2365 - protein, 16 aa, Artificial Sequence
  Synthetically generated peptide
  misc_feature (7)..(7): Xaa can be Cys or D-Cys
  misc_feature (15)..(15): Xaa can be Cys or D-Cys
AGCCELXCNPACTGXK

SEQ ID NO: 2366 - protein, 16 aa, Artificial Sequence
  Synthetically generated peptide
  misc_feature (7)..(7): Xaa can be Cys or D-Cys
  misc_feature (15)..(15): Xaa can be Cys or D-Cys
AGCCELXCNPACTGXY

SEQ ID NO: 2367 - protein, 15 aa, Artificial Sequence
  Synthetically generated peptide
  misc_feature (7)..(7): Xaa can be Cys or D-Cys
AGCCELXCTPACTGC

SEQ ID NO: 2368 - protein, 16 aa, Artificial Sequence
  Synthetically generated peptide
  misc_feature (7)..(7): Xaa can be Cys or D-Cys
AGCCELXCTPACTGCK

SEQ ID NO: 2369 - protein, 16 aa, Artificial Sequence
  Synthetically generated peptide
  misc_feature (7)..(7): Xaa can be Cys or D-Cys
AGCCELXCTPACTGCY

SEQ ID NO: 2370 - protein, 15 aa, Artificial Sequence
  Synthetically generated peptide
  misc_feature (7)..(7): Xaa can be Cys or D-Cys
  misc_feature (15)..(15): Xaa can be Cys or D-Cys
AGCCELXCTPACTGX

SEQ ID NO: 2371 - protein, 16 aa, Artificial Sequence
  Synthetically generated peptide
  misc_feature (7)..(7): Xaa can be Cys or D-Cys
  misc_feature (15)..(15): Xaa can be Cys or D-Cys
AGCCELXCTPACTGXK

SEQ ID NO: 2372 - protein, 16 aa, Artificial Sequence
  Synthetically generated peptide
  misc_feature (7)..(7): Xaa can be Cys or D-Cys
  misc_feature (15)..(15): Xaa can be Cys or D-Cys
AGCCELXCTPACTGXY

SEQ ID NO: 2373 - protein, 15 aa, Artificial Sequence
  Synthetically generated peptide
AGCCEYCCNPACTGC

SEQ ID NO: 2374 - protein, 16 aa, Artificial Sequence
  Synthetically generated peptide
AGCCEYCCNPACTGCK

SEQ ID NO: 2375 - protein, 16 aa, Artificial Sequence
  Synthetically generated peptide
AGCCEYCCNPACTGCY

SEQ ID NO: 2376 - protein, 15 aa, Artificial Sequence
  Synthetically generated peptide
  misc_feature (15)..(15): Xaa can be Cys or D-Cys
AGCCEYCCNPACTGX

SEQ ID NO: 2377 - protein, 16 aa, Artificial Sequence
  Synthetically generated peptide
  misc_feature (15)..(15): Xaa can be Cys or D-Cys
AGCCEYCCNPACTGXK

SEQ ID NO: 2378 - protein, 16 aa, Artificial Sequence
  Synthetically generated peptide
  misc_feature (15)..(15): Xaa can be Cys or D-Cys
AGCCEYCCNPACTGXY

SEQ ID NO: 2379 - protein, 15 aa, Artificial Sequence
  Synthetically generated peptide
AGCCEYCCTPACTGC

SEQ ID NO: 2380 - protein, 16 aa, Artificial Sequence
  Synthetically generated peptide
AGCCEYCCTPACTGCK

SEQ ID NO: 2381 - protein, 16 aa, Artificial Sequence
  Synthetically generated peptide
AGCCEYCCTPACTGCY

SEQ ID NO: 2382 - protein, 15 aa, Artificial Sequence
  Synthetically generated peptide
  misc_feature (15)..(15): Xaa can be Cys or D-Cys
AGCCEYCCTPACTGX

SEQ ID NO: 2383 - protein, 16 aa, Artificial Sequence
  Synthetically generated peptide
  misc_feature (15)..(15): Xaa can be Cys or D-Cys
AGCCEYCCTPACTGXK

SEQ ID NO: 2384 - protein, 16 aa, Artificial Sequence
  Synthetically generated peptide
  misc_feature (15)..(15): Xaa can be Cys or D-Cys
AGCCEYCCTPACTGXY

SEQ ID NO: 2385 - protein, 15 aa, Artificial Sequence
  Synthetically generated peptide
  misc_feature (7)..(7): Xaa can be Cys or D-Cys
AGCCEYXCNPACTGC

SEQ ID NO: 2386 - protein, 16 aa, Artificial Sequence
  Synthetically generated peptide
  misc_feature (7)..(7): Xaa can be Cys or D-Cys
AGCCEYXCNPACTGCK

SEQ ID NO: 2387 - protein, 16 aa, Artificial Sequence
  Synthetically generated peptide
  misc_feature (7)..(7): Xaa can be Cys or D-Cys
AGCCEYXCNPACTGCY

SEQ ID NO: 2388 - protein, 15 aa, Artificial Sequence
  Synthetically generated peptide
  misc_feature (7)..(7): Xaa can be Cys or D-Cys
  misc_feature (15)..(15): Xaa can be Cys or D-Cys
AGCCEYXCNPACTGX

SEQ ID NO: 2389 - protein, 16 aa, Artificial Sequence
  Synthetically generated peptide
  misc_feature (7)..(7): Xaa can be Cys or D-Cys
  misc_feature (15)..(15): Xaa can be Cys or D-Cys
AGCCEYXCNPACTGXK

SEQ ID NO: 2390 - protein, 16 aa, Artificial Sequence
  Synthetically generated peptide
  misc_feature (7)..(7): Xaa can be Cys or D-Cys
  misc_feature (15)..(15): Xaa can be Cys or D-Cys
AGCCEYXCNPACTGXY

SEQ ID NO: 2391 - protein, 15 aa, Artificial Sequence
  Synthetically generated peptide
  misc_feature (7)..(7): Xaa can be Cys or D-Cys
AGCCEYXCTPACTGC

SEQ ID NO: 2392 - protein, 16 aa, Artificial Sequence
  Synthetically generated peptide
  misc_feature (7)..(7): Xaa can be Cys or D-Cys
AGCCEYXCTPACTGCK

SEQ ID NO: 2393 - protein, 16 aa, Artificial Sequence
  Synthetically generated peptide
  misc_feature (7)..(7): Xaa can be Cys or D-Cys
AGCCEYXCTPACTGCY

SEQ ID NO: 2394 - protein, 15 aa, Artificial Sequence
  Synthetically generated peptide
  misc_feature (7)..(7): Xaa can be Cys or D-Cys
  misc_feature (15)..(15): Xaa can be Cys or D-Cys
AGCCEYXCTPACTGX

SEQ ID NO: 2395 - protein, 16 aa, Artificial Sequence
  Synthetically generated peptide
  misc_feature (7)..(7): Xaa can be Cys or D-Cys
  misc_feature (15)..(15): Xaa can be Cys or D-Cys
AGCCEYXCTPACTGXK

SEQ ID NO: 2396 - protein, 16 aa, Artificial Sequence
  Synthetically generated peptide
  misc_feature (7)..(7): Xaa can be Cys or D-Cys
  misc_feature (15)..(15): Xaa can be Cys or D-Cys
AGCCEYXCTPACTGXY

SEQ ID NO: 2397 - protein, 15 aa, Artificial Sequence
  Synthetically generated peptide
AGCCEFCCNPACTGC

SEQ ID NO: 2398 - protein, 16 aa, Artificial Sequence
  Synthetically generated peptide
AGCCEFCCNPACTGCK

SEQ ID NO: 2399 - protein, 16 aa, Artificial Sequence
  Synthetically generated peptide
AGCCEFCCNPACTGCY

SEQ ID NO: 2400 - protein, 15 aa, Artificial Sequence
  Synthetically generated peptide
  misc_feature (15)..(15): Xaa can be Cys or D-Cys
AGCCEFCCNPACTGX

SEQ ID NO: 2401 - protein, 16 aa, Artificial Sequence
  Synthetically generated peptide
  misc_feature (15)..(15): Xaa can be Cys or D-Cys
AGCCEFCCNPACTGXK

SEQ ID NO: 2402 - protein, 16 aa, Artificial Sequence
  Synthetically generated peptide
  misc_feature (15)..(15): Xaa can be Cys or D-Cys
AGCCEFCCNPACTGXY

SEQ ID NO: 2403 - protein, 15 aa, Artificial Sequence
  Synthetically generated peptide
AGCCEFCCTPACTGC

SEQ ID NO: 2404 - protein, 16 aa, Artificial Sequence
  Synthetically generated peptide
AGCCEFCCTPACTGCK

SEQ ID NO: 2405 - protein, 16 aa, Artificial Sequence
  Synthetically generated peptide
AGCCEFCCTPACTGCY

SEQ ID NO: 2406 - protein, 15 aa, Artificial Sequence
  Synthetically generated peptide
  misc_feature (15)..(15): Xaa can be Cys or D-Cys
AGCCEFCCTPACTGX

SEQ ID NO: 2407 - protein, 16 aa, Artificial Sequence
  Synthetically generated peptide
  misc_feature (15)..(15): Xaa can be Cys or D-Cys
AGCCEFCCTPACTGXK

SEQ ID NO: 2408 - protein, 16 aa, Artificial Sequence
  Synthetically generated peptide
  misc_feature (15)..(15): Xaa can be Cys or D-Cys
AGCCEFCCTPACTGXY

SEQ ID NO: 2409 - protein, 15 aa, Artificial Sequence
  Synthetically generated peptide
  misc_feature (7)..(7): Xaa can be Cys or D-Cys
AGCCEFXCNPACTGC

SEQ ID NO: 2410 - protein, 16 aa, Artificial Sequence
  Synthetically generated peptide
  misc_feature (7)..(7): Xaa can be Cys or D-Cys
AGCCEFXCNPACTGCK

SEQ ID NO: 2411 - protein, 16 aa, Artificial Sequence
  Synthetically generated peptide
  misc_feature (7)..(7): Xaa can be Cys or D-Cys
AGCCEFXCNPACTGCY

SEQ ID NO: 2412 - protein, 15 aa, Artificial Sequence
  Synthetically generated peptide
  misc_feature (7)..(7): Xaa can be Cys or D-Cys
  misc_feature (15)..(15): Xaa can be Cys or D-Cys
AGCCEFXCNPACTGX

SEQ ID NO: 2413 - protein, 16 aa, Artificial Sequence
  Synthetically generated peptide
  misc_feature (7)..(7): Xaa can be Cys or D-Cys
  misc_feature (15)..(15): Xaa can be Cys or D-Cys
AGCCEFXCNPACTGXK

SEQ ID NO: 2414 - protein, 16 aa, Artificial Sequence
  Synthetically generated peptide
  misc_feature (7)..(7): Xaa can be Cys or D-Cys
  misc_feature (15)..(15): Xaa can be Cys or D-Cys
AGCCEFXCNPACTGXY

SEQ ID NO: 2415 - protein, 15 aa, Artificial Sequence
  Synthetically generated peptide
  misc_feature (7)..(7): Xaa can be Cys or D-Cys
AGCCEFXCTPACTGC

SEQ ID NO: 2416 - protein, 16 aa, Artificial Sequence
  Synthetically generated peptide
  misc_feature (7)..(7): Xaa can be Cys or D-Cys
AGCCEFXCTPACTGCK

SEQ ID NO: 2417 - protein, 16 aa, Artificial Sequence
  Synthetically generated peptide
  misc_feature (7)..(7): Xaa can be Cys or D-Cys
AGCCEFXCTPACTGCY

SEQ ID NO: 2418 - protein, 15 aa, Artificial Sequence
  Synthetically generated peptide
  misc_feature (7)..(7): Xaa can be Cys or D-Cys
  misc_feature (15)..(15): Xaa can be Cys or D-Cys
AGCCEFXCTPACTGX

SEQ ID NO: 2419 - protein, 16 aa, Artificial Sequence
  Synthetically generated peptide
  misc_feature (7)..(7): Xaa can be Cys or D-Cys
  misc_feature (15)..(15): Xaa can be Cys or D-Cys
AGCCEFXCTPACTGXK

SEQ ID NO: 2420 - protein, 16 aa, Artificial Sequence
  Synthetically generated peptide
  misc_feature (7)..(7): Xaa can be Cys or D-Cys
  misc_feature (15)..(15): Xaa can be Cys or D-Cys
AGCCEFXCTPACTGXY

SEQ ID NO: 2421 - protein, 15 aa, Artificial Sequence
  Synthetically generated peptide
AGCCEWCCNPACTGC

SEQ ID NO: 2422 - protein, 16 aa, Artificial Sequence
  Synthetically generated peptide
AGCCEWCCNPACTGCK

SEQ ID NO: 2423 - protein, 16 aa, Artificial Sequence
  Synthetically generated peptide
AGCCEWCCNPACTGCY

SEQ ID NO: 2424 - protein, 15 aa, Artificial Sequence
  Synthetically generated peptide
  misc_feature (15)..(15): Xaa can be Cys or D-Cys
AGCCEWCCNPACTGX

SEQ ID NO: 2425 - protein, 16 aa, Artificial Sequence
  Synthetically generated peptide
  misc_feature (15)..(15): Xaa can be Cys or D-Cys
AGCCEWCCNPACTGXK

SEQ ID NO: 2426 - protein, 16 aa, Artificial Sequence
  Synthetically generated peptide
  misc_feature (15)..(15): Xaa can be Cys or D-Cys
AGCCEWCCNPACTGXY

SEQ ID NO: 2427 - protein, 15 aa, Artificial Sequence
  Synthetically generated peptide
AGCCEWCCTPACTGC

SEQ ID NO: 2428 - protein, 16 aa, Artificial Sequence
  Synthetically generated peptide
AGCCEWCCTPACTGCK

SEQ ID NO: 2429 - protein, 16 aa, Artificial Sequence
  Synthetically generated peptide
AGCCEWCCTPACTGCY

SEQ ID NO: 2430 - protein, 15 aa, Artificial Sequence
  Synthetically generated peptide
  misc_feature (15)..(15): Xaa can be Cys or D-Cys
AGCCEWCCTPACTGX

SEQ ID NO: 2431 - protein, 16 aa, Artificial Sequence
  Synthetically generated peptide
  misc_feature (15)..(15): Xaa can be Cys or D-Cys
AGCCEWCCTPACTGXK

SEQ ID NO: 2432 - protein, 16 aa, Artificial Sequence
  Synthetically generated peptide
  misc_feature (15)..(15): Xaa can be Cys or D-Cys
AGCCEWCCTPACTGXY

SEQ ID NO: 2433 - protein, 15 aa, Artificial Sequence
  Synthetically generated peptide
  misc_feature (7)..(7): Xaa can be Cys or D-Cys
AGCCEWXCNPACTGC

SEQ ID NO: 2434 - protein, 16 aa, Artificial Sequence
  Synthetically generated peptide
  misc_feature (7)..(7): Xaa can be Cys or D-Cys
AGCCEWXCNPACTGCK

SEQ ID NO: 2435 - protein, 16 aa, Artificial Sequence
  Synthetically generated peptide
  misc_feature (7)..(7): Xaa can be Cys or D-Cys
AGCCEWXCNPACTGCY

SEQ ID NO: 2436 - protein, 15 aa, Artificial Sequence
  Synthetically generated peptide
  misc_feature (7)..(7): Xaa can be Cys or D-Cys
  misc_feature (15)..(15): Xaa can be Cys or D-Cys
AGCCEWXCNPACTGX

SEQ ID NO: 2437 - protein, 16 aa, Artificial Sequence
  Synthetically generated peptide
  misc_feature (7)..(7): Xaa can be Cys or D-Cys
  misc_feature (15)..(15): Xaa can be Cys or D-Cys
AGCCEWXCNPACTGXK

SEQ ID NO: 2438 - protein, 16 aa, Artificial Sequence
  Synthetically generated peptide
  misc_feature (7)..(7): Xaa can be Cys or D-Cys
  misc_feature (15)..(15): Xaa can be Cys or D-Cys
AGCCEWXCNPACTGXY

SEQ ID NO: 2439 - protein, 15 aa, Artificial Sequence
  Synthetically generated peptide
  misc_feature (7)..(7): Xaa can be Cys or D-Cys
AGCCEWXCTPACTGC

SEQ ID NO: 2440 - protein, 16 aa, Artificial Sequence
  Synthetically generated peptide
  misc_feature (7)..(7): Xaa can be Cys or D-Cys
AGCCEWXCTPACTGCK

SEQ ID NO: 2441 - protein, 16 aa, Artificial Sequence
  Synthetically generated peptide
  misc_feature (7)..(7): Xaa can be Cys or D-Cys
AGCCEWXCTPACTGCY

SEQ ID NO: 2442 - protein, 15 aa, Artificial Sequence
  Synthetically generated peptide
  misc_feature (7)..(7): Xaa can be Cys or D-Cys
  misc_feature (15)..(15): Xaa can be Cys or D-Cys
AGCCEWXCTPACTGX

SEQ ID NO: 2443 - protein, 16 aa, Artificial Sequence
  Synthetically generated peptide
  misc_feature (7)..(7): Xaa can be Cys or D-Cys
  misc_feature (15)..(15): Xaa can be Cys or D-Cys
AGCCEWXCTPACTGXK

SEQ ID NO: 2444 - protein, 16 aa, Artificial Sequence
  Synthetically generated peptide
  misc_feature (7)..(7): Xaa can be Cys or D-Cys
  misc_feature (15)..(15): Xaa can be Cys or D-Cys
AGCCEWXCTPACTGXY

SEQ ID NO: 2445 - protein, 15 aa, Artificial Sequence
  Synthetically generated peptide
  misc_feature (3)..(3): Xaa can be Cys or D-Cys
AGXCEVCCNPACTGC

SEQ ID NO: 2446 - protein, 16 aa, Artificial Sequence
  Synthetically generated peptide
  misc_feature (3)..(3): Xaa can be Cys or D-Cys
AGXCEVCCNPACTGCK

SEQ ID NO: 2447 - protein, 16 aa, Artificial Sequence
  Synthetically generated peptide
  misc_feature (3)..(3): Xaa can be Cys or D-Cys
AGXCEVCCNPACTGCY

SEQ ID NO: 2448 - protein, 15 aa, Artificial Sequence
  Synthetically generated peptide
  misc_feature (3)..(3): Xaa can be Cys or D-Cys
  misc_feature (15)..(15): Xaa can be Cys or D-Cys
AGXCEVCCNPACTGX

SEQ ID NO: 2449 - protein, 16 aa, Artificial Sequence
  Synthetically generated peptide
  misc_feature (3)..(3): Xaa can be Cys or D-Cys
  misc_feature (15)..(15): Xaa can be Cys or D-Cys
AGXCEVCCNPACTGXK

SEQ ID NO: 2450 - protein, 16 aa, Artificial Sequence
  Synthetically generated peptide
  misc_feature (3)..(3): Xaa can be Cys or D-Cys
  misc_feature (15)..(15): Xaa can be Cys or D-Cys
AGXCEVCCNPACTGXY

SEQ ID NO: 2451 - protein, 15 aa, Artificial Sequence
  Synthetically generated peptide
  misc_feature (3)..(3): Xaa can be Cys or D-Cys
AGXCEVCCTPACTGC

SEQ ID NO: 2452 - protein, 16 aa, Artificial Sequence
  Synthetically generated peptide
  misc_feature (3)..(3): Xaa can be Cys or D-Cys
AGXCEVCCTPACTGCK

SEQ ID NO: 2453 - protein, 16 aa, Artificial Sequence
  Synthetically generated peptide
  misc_feature (3)..(3): Xaa can be Cys or D-Cys
AGXCEVCCTPACTGCY

SEQ ID NO: 2454 - protein, 15 aa, Artificial Sequence
  Synthetically generated peptide
  misc_feature (3)..(3): Xaa can be Cys or D-Cys
  misc_feature (15)..(15): Xaa can be Cys or D-Cys
AGXCEVCCTPACTGX

SEQ ID NO: 2455 - protein, 16 aa, Artificial Sequence
  Synthetically generated peptide
  misc_feature (3)..(3): Xaa can be Cys or D-Cys
  misc_feature (15)..(15): Xaa can be Cys or D-Cys
AGXCEVCCTPACTGXK

SEQ ID NO: 2456 - protein, 16 aa, Artificial Sequence
  Synthetically generated peptide
  misc_feature (3)..(3): Xaa can be Cys or D-Cys
  misc_feature (15)..(15): Xaa can be Cys or D-Cys
AGXCEVCCTPACTGXY

SEQ ID NO: 2457 - protein, 15 aa, Artificial Sequence
  Synthetically generated peptide
  misc_feature (3)..(3): Xaa can be Cys or D-Cys
  misc_feature (7)..(7): Xaa can be Cys or D-Cys
AGXCEVXCNPACTGC

SEQ ID NO: 2458 - protein, 16 aa, Artificial Sequence
  Synthetically generated peptide
  misc_feature (3)..(3): Xaa can be Cys or D-Cys
  misc_feature (7)..(7): Xaa can be Cys or D-Cys
AGXCEVXCNPACTGCK

SEQ ID NO: 2459 - protein, 16 aa, Artificial Sequence
  Synthetically generated peptide
  misc_feature (3)..(3): Xaa can be Cys or D-Cys
  misc_feature (7)..(7): Xaa can be Cys or D-Cys
AGXCEVXCNPACTGCY

SEQ ID NO: 2460 - protein, 15 aa, Artificial Sequence
  Synthetically generated peptide
  misc_feature (3)..(3): Xaa can be Cys or D-Cys
  misc_feature (7)..(7): Xaa can be Cys or D-Cys
  misc_feature (15)..(15): Xaa can be Cys or D-Cys
AGXCEVXCNPACTGX

SEQ ID NO: 2461 - protein, 16 aa, Artificial Sequence
  Synthetically generated peptide
  misc_feature (3)..(3): Xaa can be Cys or D-Cys
  misc_feature (7)..(7): Xaa can be Cys or D-Cys
  misc_feature (15)..(15): Xaa can be Cys or D-Cys
AGXCEVXCNPACTGXK

SEQ ID NO: 2462 - protein, 16 aa, Artificial Sequence
  Synthetically generated peptide
  misc_feature (3)..(3): Xaa can be Cys or D-Cys
  misc_feature (7)..(7): Xaa can be Cys or D-Cys
  misc_feature (15)..(15): Xaa can be Cys or D-Cys
AGXCEVXCNPACTGXY

SEQ ID NO: 2463 - protein, 15 aa, Artificial Sequence
  Synthetically generated peptide
  misc_feature (3)..(3): Xaa can be Cys or D-Cys
  misc_feature (7)..(7): Xaa can be Cys or D-Cys
AGXCEVXCTPACTGC

SEQ ID NO: 2464 - protein, 16 aa, Artificial Sequence
  Synthetically generated peptide
  misc_feature (3)..(3): Xaa can be Cys or D-Cys
  misc_feature (7)..(7): Xaa can be Cys or D-Cys
AGXCEVXCTPACTGCK

SEQ ID NO: 2465 - protein, 16 aa, Artificial Sequence
  Synthetically generated peptide
  misc_feature (3)..(3): Xaa can be Cys or D-Cys
  misc_feature (7)..(7): Xaa can be Cys or D-Cys
AGXCEVXCTPACTGCY

SEQ ID NO: 2466 - protein, 15 aa, Artificial Sequence
  Synthetically generated peptide
  misc_feature (3)..(3): Xaa can be Cys or D-Cys
  misc_feature (7)..(7): Xaa can be Cys or D-Cys
  misc_feature (15)..(15): Xaa can be Cys or D-Cys
AGXCEVXCTPACTGX

SEQ ID NO: 2467 - protein, 16 aa, Artificial Sequence
  Synthetically generated peptide
  misc_feature (3)..(3): Xaa can be Cys or D-Cys
  misc_feature (7)..(7): Xaa can be Cys or D-Cys
  misc_feature (15)..(15): Xaa can be Cys or D-Cys
AGXCEVXCTPACTGXK

SEQ ID NO: 2468 - protein, 16 aa, Artificial Sequence
  Synthetically generated peptide
  misc_feature (3)..(3): Xaa can be Cys or D-Cys
  misc_feature (7)..(7): Xaa can be Cys or D-Cys
  misc_feature (15)..(15): Xaa can be Cys or D-Cys
AGXCEVXCTPACTGXY

SEQ ID NO: 2469 - protein, 15 aa, Artificial Sequence
  Synthetically generated peptide
  misc_feature (3)..(3): Xaa can be Cys or D-Cys
AGXCEICCNPACTGC

SEQ ID NO: 2470 - protein, 16 aa, Artificial Sequence
  Synthetically generated peptide
  misc_feature (3)..(3): Xaa can be Cys or D-Cys
AGXCEICCNPACTGCK

SEQ ID NO: 2471 - protein, 16 aa, Artificial Sequence
  Synthetically generated peptide
  misc_feature (3)..(3): Xaa can be Cys or D-Cys
AGXCEICCNPACTGCY

SEQ ID NO: 2472 - protein, 15 aa, Artificial Sequence
  Synthetically generated peptide
  misc_feature (3)..(3): Xaa can be Cys or D-Cys
  misc_feature (15)..(15): Xaa can be Cys or D-Cys
AGXCEICCNPACTGX

SEQ ID NO: 2473 - protein, 16 aa, Artificial Sequence
  Synthetically generated peptide
  misc_feature (3)..(3): Xaa can be Cys or D-Cys
  misc_feature (15)..(15): Xaa can be Cys or D-Cys
AGXCEICCNPACTGXK

SEQ ID NO: 2474 - protein, 16 aa, Artificial Sequence
  Synthetically generated peptide
  misc_feature (3)..(3): Xaa can be Cys or D-Cys
  misc_feature (15)..(15): Xaa can be Cys or D-Cys
AGXCEICCNPACTGXY

SEQ ID NO: 2475 - protein, 15 aa, Artificial Sequence
  Synthetically generated peptide
  misc_feature (3)..(3): Xaa can be Cys or D-Cys
AGXCEICCTPACTGC

SEQ ID NO: 2476 - protein, 16 aa, Artificial Sequence
  Synthetically generated peptide
  misc_feature (3)..(3): Xaa can be Cys or D-Cys
AGXCEICCTPACTGCK

SEQ ID NO: 2477 - protein, 16 aa, Artificial Sequence
  Synthetically generated peptide
  misc_feature (3)..(3): Xaa can be Cys or D-Cys
AGXCEICCTPACTGCY

SEQ ID NO: 2478 - protein, 15 aa, Artificial Sequence
  Synthetically generated peptide
  misc_feature (3)..(3): Xaa can be Cys or D-Cys
  misc_feature (15)..(15): Xaa can be Cys or D-Cys
AGXCEICCTPACTGX

SEQ ID NO: 2479 - protein, 16 aa, Artificial Sequence
  Synthetically generated peptide
  misc_feature (3)..(3): Xaa can be Cys or D-Cys
  misc_feature (15)..(15): Xaa can be Cys or D-Cys
AGXCEICCTPACTGXK

SEQ ID NO: 2480 - protein, 16 aa, Artificial Sequence
  Synthetically generated peptide
  misc_feature (3)..(3): Xaa can be Cys or D-Cys
  misc_feature (15)..(15): Xaa can be Cys or D-Cys
AGXCEICCTPACTGXY

SEQ ID NO: 2481 - protein, 15 aa, Artificial Sequence
  Synthetically generated peptide
  misc_feature (3)..(3): Xaa can be Cys or D-Cys
  misc_feature (7)..(7): Xaa can be Cys or D-Cys
AGXCEIXCNPACTGC

SEQ ID NO: 2482 - protein, 16 aa, Artificial Sequence
  Synthetically generated peptide
  misc_feature (3)..(3): Xaa can be Cys or D-Cys
  misc_feature (7)..(7): Xaa can be Cys or D-Cys
AGXCEIXCNPACTGCK

SEQ ID NO: 2483 - protein, 16 aa, Artificial Sequence
  Synthetically generated peptide
  misc_feature (3)..(3): Xaa can be Cys or D-Cys
  misc_feature (7)..(7): Xaa can be Cys or D-Cys
AGXCEIXCNPACTGCY

SEQ ID NO: 2484 - protein, 15 aa, Artificial Sequence
  Synthetically generated peptide
  misc_feature (3)..(3): Xaa can be Cys or D-Cys
  misc_feature (7)..(7): Xaa can be Cys or D-Cys
  misc_feature (15)..(15): Xaa can be Cys or D-Cys
AGXCEIXCNPACTGX

SEQ ID NO: 2485 - protein, 16 aa, Artificial Sequence
  Synthetically generated peptide
  misc_feature (3)..(3): Xaa can be Cys or D-Cys
  misc_feature (7)..(7): Xaa can be Cys or D-Cys
  misc_feature (15)..(15): Xaa can be Cys or D-Cys
AGXCEIXCNPACTGXK

SEQ ID NO: 2486 - protein, 16 aa, Artificial Sequence
  Synthetically generated peptide
  misc_feature (3)..(3): Xaa can be Cys or D-Cys
  misc_feature (7)..(7): Xaa can be Cys or D-Cys
  misc_feature (15)..(15): Xaa can be Cys or D-Cys
AGXCEIXCNPACTGXY

SEQ ID NO: 2487 - protein, 15 aa, Artificial Sequence
  Synthetically generated peptide
  misc_feature (3)..(3): Xaa can be Cys or D-Cys
  misc_feature (7)..(7): Xaa can be Cys or D-Cys
AGXCEIXCTPACTGC

SEQ ID NO: 2488 - protein, 16 aa, Artificial Sequence
  Synthetically generated peptide
  misc_feature (3)..(3): Xaa can be Cys or D-Cys
  misc_feature (7)..(7): Xaa can be Cys or D-Cys
AGXCEIXCTPACTGCK

SEQ ID NO: 2489 - protein, 16 aa, Artificial Sequence
  Synthetically generated peptide
  misc_feature (3)..(3): Xaa can be Cys or D-Cys
  misc_feature (7)..(7): Xaa can be Cys or D-Cys
AGXCEIXCTPACTGCY

SEQ ID NO: 2490 - protein, 15 aa, Artificial Sequence
  Synthetically generated peptide
  misc_feature (3)..(3): Xaa can be Cys or D-Cys
  misc_feature (7)..(7): Xaa can be Cys or D-Cys
  misc_feature (15)..(15): Xaa can be Cys or D-Cys
AGXCEIXCTPACTGX

SEQ ID NO: 2491 - protein, 16 aa, Artificial Sequence
  Synthetically generated peptide
  misc_feature (3)..(3): Xaa can be Cys or D-Cys
  misc_feature (7)..(7): Xaa can be Cys or D-Cys
  misc_feature (15)..(15): Xaa can be Cys or D-Cys
AGXCEIXCTPACTGXK

SEQ ID NO: 2492 - protein, 16 aa, Artificial Sequence
  Synthetically generated peptide
  misc_feature (3)..(3): Xaa can be Cys or D-Cys
  misc_feature (7)..(7): Xaa can be Cys or D-Cys
  misc_feature (15)..(15): Xaa can be Cys or D-Cys
AGXCEIXCTPACTGXY

SEQ ID NO: 2493 - protein, 15 aa, Artificial Sequence
  Synthetically generated peptide
  misc_feature (3)..(3): Xaa can be Cys or D-Cys
AGXCELCCNPACTGC

SEQ ID NO: 2494 - protein, 16 aa, Artificial Sequence
  Synthetically generated peptide
  misc_feature (3)..(3): Xaa can be Cys or D-Cys
AGXCELCCNPACTGCK

SEQ ID NO: 2495 - protein, 16 aa, Artificial Sequence
  Synthetically generated peptide
  misc_feature (3)..(3): Xaa can be Cys or D-Cys
AGXCELCCNPACTGCY

SEQ ID NO: 2496 - protein, 15 aa, Artificial Sequence
  Synthetically generated peptide
  misc_feature (3)..(3): Xaa can be Cys or D-Cys
  misc_feature (15)..(15): Xaa can be Cys or D-Cys
AGXCELCCNPACTGX

SEQ ID NO: 2497 - protein, 16 aa, Artificial Sequence
  Synthetically generated peptide
  misc_feature (3)..(3): Xaa can be Cys or D-Cys
  misc_feature (15)..(15): Xaa can be Cys or D-Cys
AGXCELCCNPACTGXK

SEQ ID NO: 2498 - protein, 16 aa, Artificial Sequence
  Synthetically generated peptide
  misc_feature (3)..(3): Xaa can be Cys or D-Cys
  misc_feature (15)..(15): Xaa can be Cys or D-Cys
AGXCELCCNPACTGXY

SEQ ID NO: 2499 - protein, 15 aa, Artificial Sequence
  Synthetically generated peptide
  misc_feature (3)..(3): Xaa can be Cys or D-Cys
AGXCELCCTPACTGC

SEQ ID NO: 2500 - protein, 16 aa, Artificial Sequence
  Synthetically generated peptide
  misc_feature (3)..(3): Xaa can be Cys or D-Cys
AGXCELCCTPACTGCK

SEQ ID NO: 2501 - protein, 16 aa, Artificial Sequence
  Synthetically generated peptide
  misc_feature (3)..(3): Xaa can be Cys or D-Cys
AGXCELCCTPACTGCY

SEQ ID NO: 2502 - protein, 15 aa, Artificial Sequence
  Synthetically generated peptide
  misc_feature (3)..(3): Xaa can be Cys or D-Cys
  misc_feature (15)..(15): Xaa can be Cys or D-Cys
AGXCELCCTPACTGX

SEQ ID NO: 2503 - protein, 16 aa, Artificial Sequence
  Synthetically generated peptide
  misc_feature (3)..(3): Xaa can be Cys or D-Cys
  misc_feature (15)..(15): Xaa can be Cys or D-Cys
AGXCELCCTPACTGXK

SEQ ID NO: 2504 - protein, 16 aa, Artificial Sequence
  Synthetically generated peptide
  misc_feature (3)..(3): Xaa can be Cys or D-Cys
  misc_feature (15)..(15): Xaa can be Cys or D-Cys
AGXCELCCTPACTGXY

SEQ ID NO: 2505 - protein, 15 aa, Artificial Sequence
  Synthetically generated peptide
  misc_feature (3)..(3): Xaa can be Cys or D-Cys
  misc_feature (7)..(7): Xaa can be Cys or D-Cys
AGXCELXCNPACTGC

SEQ ID NO: 2506 - protein, 16 aa, Artificial Sequence
  Synthetically generated peptide
  misc_feature (3)..(3): Xaa can be Cys or D-Cys
  misc_feature (7)..(7): Xaa can be Cys or D-Cys
AGXCELXCNPACTGCK

SEQ ID NO: 2507 - protein, 16 aa, Artificial Sequence
  Synthetically generated peptide
  misc_feature (3)..(3): Xaa can be Cys or D-Cys
  misc_feature (7)..(7): Xaa can be Cys or D-Cys
AGXCELXCNPACTGCY

SEQ ID NO: 2508 - protein, 15 aa, Artificial Sequence
  Synthetically generated peptide
  misc_feature (3)..(3): Xaa can be Cys or D-Cys
  misc_feature (7)..(7): Xaa can be Cys or D-Cys
  misc_feature (15)..(15): Xaa can be Cys or D-Cys
AGXCELXCNPACTGX

SEQ ID NO: 2509 - protein, 16 aa, Artificial Sequence
  Synthetically generated peptide
  misc_feature (3)..(3): Xaa can be Cys or D-Cys
  misc_feature (7)..(7): Xaa can be Cys or D-Cys
  misc_feature (15)..(15): Xaa can be Cys or D-Cys
AGXCELXCNPACTGXK

SEQ ID NO: 2510 - protein, 16 aa, Artificial Sequence
  Synthetically generated peptide
  misc_feature (3)..(3): Xaa can be Cys or D-Cys
  misc_feature (7)..(7): Xaa can be Cys or D-Cys
  misc_feature (15)..(15): Xaa can be Cys or D-Cys
AGXCELXCNPACTGXY

SEQ ID NO: 2511 - protein, 15 aa, Artificial Sequence
  Synthetically generated peptide
  misc_feature (3)..(3): Xaa can be Cys or D-Cys
  misc_feature (7)..(7): Xaa can be Cys or D-Cys
AGXCELXCTPACTGC

SEQ ID NO: 2512 - protein, 16 aa, Artificial Sequence
  Synthetically generated peptide
  misc_feature (3)..(3): Xaa can be Cys or D-Cys
  misc_feature (7)..(7): Xaa can be Cys or D-Cys
AGXCELXCTPACTGCK

SEQ ID NO: 2513 - protein, 16 aa, Artificial Sequence
  Synthetically generated peptide
  misc_feature (3)..(3): Xaa can be Cys or D-Cys
  misc_feature (7)..(7): Xaa can be Cys or D-Cys
AGXCELXCTPACTGCY

SEQ ID NO: 2514 - protein, 15 aa, Artificial Sequence
  Synthetically generated peptide
  misc_feature (3)..(3): Xaa can be Cys or D-Cys
  misc_feature (7)..(7): Xaa can be Cys or D-Cys
  misc_feature (15)..(15): Xaa can be Cys or D-Cys
AGXCELXCTPACTGX

SEQ ID NO: 2515 - protein, 16 aa, Artificial Sequence
  Synthetically generated peptide
  misc_feature (3)..(3): Xaa can be Cys or D-Cys
  misc_feature (7)..(7): Xaa can be Cys or D-Cys
  misc_feature (15)..(15): Xaa can be Cys or D-Cys
AGXCELXCTPACTGXK

SEQ ID NO: 2516 - protein, 16 aa, Artificial Sequence
  Synthetically generated peptide
  misc_feature (3)..(3): Xaa can be Cys or D-Cys
  misc_feature (7)..(7): Xaa can be Cys or D-Cys
  misc_feature (15)..(15): Xaa can be Cys or D-Cys
AGXCELXCTPACTGXY

SEQ ID NO: 2517 - protein, 15 aa, Artificial Sequence
  Synthetically generated peptide
  misc_feature (3)..(3): Xaa can be Cys or D-Cys
AGXCEYCCNPACTGC

SEQ ID NO: 2518 - protein, 16 aa, Artificial Sequence
  Synthetically generated peptide
  misc_feature (3)..(3): Xaa can be Cys or D-Cys
AGXCEYCCNPACTGCK

SEQ ID NO: 2519 - protein, 16 aa, Artificial Sequence
  Synthetically generated peptide
  misc_feature (3)..(3): Xaa can be Cys or D-Cys
AGXCEYCCNPACTGCY

SEQ ID NO: 2520 - protein, 15 aa, Artificial Sequence
  Synthetically generated peptide
  misc_feature (3)..(3): Xaa can be Cys or D-Cys
  misc_feature (15)..(15): Xaa can be Cys or D-Cys
AGXCEYCCNPACTGX

SEQ ID NO: 2521 - protein, 16 aa, Artificial Sequence
  Synthetically generated peptide
  misc_feature (3)..(3): Xaa can be Cys or D-Cys
  misc_feature (15)..(15): Xaa can be Cys or D-Cys
AGXCEYCCNPACTGXK

SEQ ID NO: 2522 - protein, 16 aa, Artificial Sequence
  Synthetically generated peptide
  misc_feature (3)..(3): Xaa can be Cys or D-Cys
  misc_feature (15)..(15): Xaa can be Cys or D-Cys
AGXCEYCCNPACTGXY

SEQ ID NO: 2523 - protein, 15 aa, Artificial Sequence
  Synthetically generated peptide
  misc_feature (3)..(3): Xaa can be Cys or D-Cys
AGXCEYCCTPACTGC

SEQ ID NO: 2524 - protein, 16 aa, Artificial Sequence
  Synthetically generated peptide
  misc_feature (3)..(3): Xaa can be Cys or D-Cys
AGXCEYCCTPACTGCK

SEQ ID NO: 2525 - protein, 16 aa, Artificial Sequence
  Synthetically generated peptide
  misc_feature (3)..(3): Xaa can be Cys or D-Cys
AGXCEYCCTPACTGCY

SEQ ID NO: 2526 - protein, 15 aa, Artificial Sequence
  Synthetically generated peptide
  misc_feature (3)..(3): Xaa can be Cys or D-Cys
  misc_feature (15)..(15): Xaa can be Cys or D-Cys
AGXCEYCCTPACTGX

SEQ ID NO: 2527 - protein, 16 aa, Artificial Sequence
  Synthetically generated peptide
  misc_feature (3)..(3): Xaa can be Cys or D-Cys
  misc_feature (15)..(15): Xaa can be Cys or D-Cys
AGXCEYCCTPACTGXK

SEQ ID NO: 2528 - protein, 16 aa, Artificial Sequence
  Synthetically generated peptide
  misc_feature (3)..(3): Xaa can be Cys or D-Cys
  misc_feature (15)..(15): Xaa can be Cys or D-Cys
AGXCEYCCTPACTGXY

SEQ ID NO: 2529 - protein, 15 aa, Artificial Sequence
  Synthetically generated peptide
  misc_feature (3)..(3): Xaa can be Cys or D-Cys
  misc_feature (7)..(7): Xaa can be Cys or D-Cys
AGXCEYXCNPACTGC

SEQ ID NO: 2530 - protein, 16 aa, Artificial Sequence
  Synthetically generated peptide
  misc_feature (3)..(3): Xaa can be Cys or D-Cys
  misc_feature (7)..(7): Xaa can be Cys or D-Cys
AGXCEYXCNPACTGCK

SEQ ID NO: 2531 - protein, 16 aa, Artificial Sequence
  Synthetically generated peptide
  misc_feature (3)..(3): Xaa can be Cys or D-Cys
  misc_feature (7)..(7): Xaa can be Cys or D-Cys
AGXCEYXCNPACTGCY

SEQ ID NO: 2532 - protein, 15 aa, Artificial Sequence
  Synthetically generated peptide
  misc_feature (3)..(3): Xaa can be Cys or D-Cys
  misc_feature (7)..(7): Xaa can be Cys or D-Cys
  misc_feature (15)..(15): Xaa can be Cys or D-Cys
AGXCEYXCNPACTGX

SEQ ID NO: 2533 - protein, 16 aa, Artificial Sequence
  Synthetically generated peptide
  misc_feature (3)..(3): Xaa can be Cys or D-Cys
  misc_feature (7)..(7): Xaa can be Cys or D-Cys
  misc_feature (15)..(15): Xaa can be Cys or D-Cys
AGXCEYXCNPACTGXK

SEQ ID NO: 2534 - protein, 16 aa, Artificial Sequence
  Synthetically generated peptide
  misc_feature (3)..(3): Xaa can be Cys or D-Cys
  misc_feature (7)..(7): Xaa can be Cys or D-Cys
  misc_feature (15)..(15): Xaa can be Cys or D-Cys
AGXCEYXCNPACTGXY

SEQ ID NO: 2535 - protein, 15 aa, Artificial Sequence
  Synthetically generated peptide
  misc_feature (3)..(3): Xaa can be Cys or D-Cys
  misc_feature (7)..(7): Xaa can be Cys or D-Cys
AGXCEYXCTPACTGC

SEQ ID NO: 2536 - protein, 16 aa, Artificial Sequence
  Synthetically generated peptide
  misc_feature (3)..(3): Xaa can be Cys or D-Cys
  misc_feature (7)..(7): Xaa can be Cys or D-Cys
AGXCEYXCTPACTGCK

SEQ ID NO: 2537 - protein, 16 aa, Artificial Sequence
  Synthetically generated peptide
  misc_feature (3)..(3): Xaa can be Cys or D-Cys
  misc_feature (7)..(7): Xaa can be Cys or D-Cys
AGXCEYXCTPACTGCY

SEQ ID NO: 2538 - protein, 15 aa, Artificial Sequence
  Synthetically generated peptide
  misc_feature (3)..(3): Xaa can be Cys or D-Cys
  misc_feature (7)..(7): Xaa can be Cys or D-Cys
  misc_feature (15)..(15): Xaa can be Cys or D-Cys
AGXCEYXCTPACTGX

SEQ ID NO: 2539 - protein, 16 aa, Artificial Sequence
  Synthetically generated peptide
  misc_feature (3)..(3): Xaa can be Cys or D-Cys
  misc_feature (7)..(7): Xaa can be Cys or D-Cys
  misc_feature (15)..(15): Xaa can be Cys or D-Cys
AGXCEYXCTPACTGXK

SEQ ID NO: 2540 - protein, 16 aa, Artificial Sequence
  Synthetically generated peptide
  misc_feature (3)..(3): Xaa can be Cys or D-Cys
  misc_feature (7)..(7): Xaa can be Cys or D-Cys
  misc_feature (15)..(15): Xaa can be Cys or D-Cys
AGXCEYXCTPACTGXY

SEQ ID NO: 2541 - protein, 15 aa, Artificial Sequence
  Synthetically generated peptide
  misc_feature (3)..(3): Xaa can be Cys or D-Cys
AGXCEFCCNPACTGC

SEQ ID NO: 2542 - protein, 16 aa, Artificial Sequence
  Synthetically generated peptide
  misc_feature (3)..(3): Xaa can be Cys or D-Cys
AGXCEFCCNPACTGCK

SEQ ID NO: 2543 - protein, 16 aa, Artificial Sequence
  Synthetically generated peptide
  misc_feature (3)..(3): Xaa can be Cys or D-Cys
AGXCEFCCNPACTGCY

SEQ ID NO: 2544 - protein, 15 aa, Artificial Sequence
  Synthetically generated peptide
  misc_feature (3)..(3): Xaa can be Cys or D-Cys
  misc_feature (15)..(15): Xaa can be Cys or D-Cys
AGXCEFCCNPACTGX

SEQ ID NO: 2545 - protein, 16 aa, Artificial Sequence
  Synthetically generated peptide
  misc_feature (3)..(3): Xaa can be Cys or D-Cys
  misc_feature (15)..(15): Xaa can be Cys or D-Cys
AGXCEFCCNPACTGXK

SEQ ID NO: 2546 - protein, 16 aa, Artificial Sequence
  Synthetically generated peptide
  misc_feature (3)..(3): Xaa can be Cys or D-Cys
  misc_feature (15)..(15): Xaa can be Cys or D-Cys
AGXCEFCCNPACTGXY

SEQ ID NO: 2547 - protein, 15 aa, Artificial Sequence
  Synthetically generated peptide
  misc_feature (3)..(3): Xaa can be Cys or D-Cys
AGXCEFCCTPACTGC

SEQ ID NO: 2548 - protein, 16 aa, Artificial Sequence
  Synthetically generated peptide
  misc_feature (3)..(3): Xaa can be Cys or D-Cys
AGXCEFCCTPACTGCK

SEQ ID NO: 2549 - protein, 16 aa, Artificial Sequence
  Synthetically generated peptide
  misc_feature (3)..(3): Xaa can be Cys or D-Cys
AGXCEFCCTPACTGCY

SEQ ID NO: 2550 - protein, 15 aa, Artificial Sequence
  Synthetically generated peptide
  misc_feature (3)..(3): Xaa can be Cys or D-Cys
  misc_feature (15)..(15): Xaa can be Cys or D-Cys
AGXCEFCCTPACTGX

SEQ ID NO: 2551 - protein, 16 aa, Artificial Sequence
  Synthetically generated peptide
  misc_feature (3)..(3): Xaa can be Cys or D-Cys
  misc_feature (15)..(15): Xaa can be Cys or D-Cys
AGXCEFCCTPACTGXK

SEQ ID NO: 2552 - protein, 16 aa, Artificial Sequence
  Synthetically generated peptide
  misc_feature (3)..(3): Xaa can be Cys or D-Cys
  misc_feature (15)..(15): Xaa can be Cys or D-Cys
AGXCEFCCTPACTGXY

SEQ ID NO: 2553 - protein, 15 aa, Artificial Sequence
  Synthetically generated peptide
  misc_feature (3)..(3): Xaa can be Cys or D-Cys
  misc_feature (7)..(7): Xaa can be Cys or D-Cys
AGXCEFXCNPACTGC

SEQ ID NO: 2554 - protein, 16 aa, Artificial Sequence
  Synthetically generated peptide
  misc_feature (3)..(3): Xaa can be Cys or D-Cys
  misc_feature (7)..(7): Xaa can be Cys or D-Cys
AGXCEFXCNPACTGCK

SEQ ID NO: 2555 - protein, 16 aa, Artificial Sequence
  Synthetically generated peptide
  misc_feature (3)..(3): Xaa can be Cys or D-Cys
  misc_feature (7)..(7): Xaa can be Cys or D-Cys
AGXCEFXCNPACTGCY

SEQ ID NO: 2556 - protein, 15 aa, Artificial Sequence
  Synthetically generated peptide
  misc_feature (3)..(3): Xaa can be Cys or D-Cys
  misc_feature (7)..(7): Xaa can be Cys or D-Cys
  misc_feature (15)..(15): Xaa can be Cys or D-Cys
AGXCEFXCNPACTGX

SEQ ID NO: 2557 - protein, 16 aa, Artificial Sequence
  Synthetically generated peptide
  misc_feature (3)..(3): Xaa can be Cys or D-Cys
  misc_feature (7)..(7): Xaa can be Cys or D-Cys
  misc_feature (15)..(15): Xaa can be Cys or D-Cys
AGXCEFXCNPACTGXK

SEQ ID NO: 2558 - protein, 16 aa, Artificial Sequence
  Synthetically generated peptide
  misc_feature (3)..(3): Xaa can be Cys or D-Cys
  misc_feature (7)..(7): Xaa can be Cys or D-Cys
  misc_feature (15)..(15): Xaa can be Cys or D-Cys
AGXCEFXCNPACTGXY

SEQ ID NO: 2559 - protein, 15 aa, Artificial Sequence
  Synthetically generated peptide
  misc_feature (3)..(3): Xaa can be Cys or D-Cys
  misc_feature (7)..(7): Xaa can be Cys or D-Cys
AGXCEFXCTPACTGC

SEQ ID NO: 2560 - protein, 16 aa, Artificial Sequence
  Synthetically generated peptide
  misc_feature (3)..(3): Xaa can be Cys or D-Cys
  misc_feature (7)..(7): Xaa can be Cys or D-Cys
AGXCEFXCTPACTGCK

SEQ ID NO: 2561 - protein, 16 aa, Artificial Sequence
  Synthetically generated peptide
  misc_feature (3)..(3): Xaa can be Cys or D-Cys
  misc_feature (7)..(7): Xaa can be Cys or D-Cys
AGXCEFXCTPACTGCY

SEQ ID NO: 2562 - protein, 15 aa, Artificial Sequence
  Synthetically generated peptide
  misc_feature (3)..(3): Xaa can be Cys or D-Cys
  misc_feature (7)..(7): Xaa can be Cys or D-Cys
  misc_feature (15)..(15): Xaa can be Cys or D-Cys
AGXCEFXCTPACTGX

SEQ ID NO: 2563 - protein, 16 aa, Artificial Sequence
  Synthetically generated peptide
  misc_feature (3)..(3): Xaa can be Cys or D-Cys
  misc_feature (7)..(7): Xaa can be Cys or D-Cys
  misc_feature (15)..(15): Xaa can be Cys or D-Cys
AGXCEFXCTPACTGXK

SEQ ID NO: 2564 - protein, 16 aa, Artificial Sequence
  Synthetically generated peptide
  misc_feature (3)..(3): Xaa can be Cys or D-Cys
  misc_feature (7)..(7): Xaa can be Cys or D-Cys
  misc_feature (15)..(15): Xaa can be Cys or D-Cys
AGXCEFXCTPACTGXY

SEQ ID NO: 2565 - protein, 15 aa, Artificial Sequence
  Synthetically generated peptide
  misc_feature (3)..(3): Xaa can be Cys or D-Cys
AGXCEWCCNPACTGC

SEQ ID NO: 2566 - protein, 16 aa, Artificial Sequence
  Synthetically generated peptide
  misc_feature (3)..(3): Xaa can be Cys or D-Cys
AGXCEWCCNPACTGCK

SEQ ID NO: 2567 - protein, 16 aa, Artificial Sequence
  Synthetically generated peptide
  misc_feature (3)..(3): Xaa can be Cys or D-Cys
AGXCEWCCNPACTGCY

SEQ ID NO: 2568 - protein, 15 aa, Artificial Sequence
  Synthetically generated peptide
  misc_feature (3)..(3): Xaa can be Cys or D-Cys
  misc_feature (15)..(15): Xaa can be Cys or D-Cys
AGXCEWCCNPACTGX

SEQ ID NO: 2569 - protein, 16 aa, Artificial Sequence
  Synthetically generated peptide
  misc_feature (3)..(3): Xaa can be Cys or D-Cys
  misc_feature (15)..(15): Xaa can be Cys or D-Cys
AGXCEWCCNPACTGXK

SEQ ID NO: 2570 - protein, 16 aa, Artificial Sequence
  Synthetically generated peptide
  misc_feature (3)..(3): Xaa can be Cys or D-Cys
  misc_feature (15)..(15): Xaa can be Cys or D-Cys
AGXCEWCCNPACTGXY

SEQ ID NO: 2571 - protein, 15 aa, Artificial Sequence
  Synthetically generated peptide
  misc_feature (3)..(3): Xaa can be Cys or D-Cys
AGXCEWCCTPACTGC

SEQ ID NO: 2572 - protein, 16 aa, Artificial Sequence
  Synthetically generated peptide
  misc_feature (3)..(3): Xaa can be Cys or D-Cys
AGXCEWCCTPACTGCK

SEQ ID NO: 2573 - protein, 16 aa, Artificial Sequence
  Synthetically generated peptide
  misc_feature (3)..(3): Xaa can be Cys or D-Cys
AGXCEWCCTPACTGCY

SEQ ID NO: 2574 - protein, 15 aa, Artificial Sequence
  Synthetically generated peptide
  misc_feature (3)..(3): Xaa can be Cys or D-Cys
  misc_feature (15)..(15): Xaa can be Cys or D-Cys
AGXCEWCCTPACTGX

SEQ ID NO: 2575 - protein, 16 aa, Artificial Sequence
  Synthetically generated peptide
  misc_feature (3)..(3): Xaa can be Cys or D-Cys
  misc_feature (15)..(15): Xaa can be Cys or D-Cys
AGXCEWCCTPACTGXK

SEQ ID NO: 2576 - protein, 16 aa, Artificial Sequence
  Synthetically generated peptide
  misc_feature (3)..(3): Xaa can be Cys or D-Cys
  misc_feature (15)..(15): Xaa can be Cys or D-Cys
AGXCEWCCTPACTGXY

SEQ ID NO: 2577 - protein, 15 aa, Artificial Sequence
  Synthetically generated peptide
  misc_feature (3)..(3): Xaa can be Cys or D-Cys
  misc_feature (7)..(7): Xaa can be Cys or D-Cys
AGXCEWXCNPACTGC

SEQ ID NO: 2578 - protein, 16 aa, Artificial Sequence
  Synthetically generated peptide
  misc_feature (3)..(3): Xaa can be Cys or D-Cys
  misc_feature (7)..(7): Xaa can be Cys or D-Cys
AGXCEWXCNPACTGCK

SEQ ID NO: 2579 - protein, 16 aa, Artificial Sequence
  Synthetically generated peptide
  misc_feature (3)..(3): Xaa can be Cys or D-Cys
  misc_feature (7)..(7): Xaa can be Cys or D-Cys
AGXCEWXCNPACTGCY

SEQ ID NO: 2580 - protein, 15 aa, Artificial Sequence
  Synthetically generated peptide
  misc_feature (3)..(3): Xaa can be Cys or D-Cys
  misc_feature (7)..(7): Xaa can be Cys or D-Cys
  misc_feature (15)..(15): Xaa can be Cys or D-Cys
AGXCEWXCNPACTGX

SEQ ID NO: 2581 - protein, 16 aa, Artificial Sequence
  Synthetically generated peptide
  misc_feature (3)..(3): Xaa can be Cys or D-Cys
  misc_feature (7)..(7): Xaa can be Cys or D-Cys
  misc_feature (15)..(15): Xaa can be Cys or D-Cys
AGXCEWXCNPACTGXK

SEQ ID NO: 2582 - protein, 16 aa, Artificial Sequence
  Synthetically generated peptide
  misc_feature (3)..(3): Xaa can be Cys or D-Cys
  misc_feature (7)..(7): Xaa can be Cys or D-Cys
  misc_feature (15)..(15): Xaa can be Cys or D-Cys
AGXCEWXCNPACTGXY

SEQ ID NO: 2583 - protein, 15 aa, Artificial Sequence
  Synthetically generated peptide
  misc_feature (3)..(3): Xaa can be Cys or D-Cys
  misc_feature (7)..(7): Xaa can be Cys or D-Cys
AGXCEWXCTPACTGC

SEQ ID NO: 2584 - protein, 16 aa, Artificial Sequence
  Synthetically generated peptide
  misc_feature (3)..(3): Xaa can be Cys or D-Cys
  misc_feature (7)..(7): Xaa can be Cys or D-Cys
AGXCEWXCTPACTGCK

SEQ ID NO: 2585 - protein, 16 aa, Artificial Sequence
  Synthetically generated peptide
  misc_feature (3)..(3): Xaa can be Cys or D-Cys
  misc_feature (7)..(7): Xaa can be Cys or D-Cys
AGXCEWXCTPACTGCY

SEQ ID NO: 2586 - protein, 15 aa, Artificial Sequence
  Synthetically generated peptide
  misc_feature (3)..(3): Xaa can be Cys or D-Cys
  misc_feature (7)..(7): Xaa can be Cys or D-Cys
  misc_feature (15)..(15): Xaa can be Cys or D-Cys
AGXCEWXCTPACTGX

SEQ ID NO: 2587 - protein, 16 aa, Artificial Sequence
  Synthetically generated peptide
  misc_feature (3)..(3): Xaa can be Cys or D-Cys
  misc_feature (7)..(7): Xaa can be Cys or D-Cys
  misc_feature (15)..(15): Xaa can be Cys or D-Cys
AGXCEWXCTPACTGXK

SEQ ID NO: 2588 - protein, 16 aa, Artificial Sequence
  Synthetically generated peptide
  misc_feature (3)..(3): Xaa can be Cys or D-Cys
  misc_feature (7)..(7): Xaa can be Cys or D-Cys
  misc_feature (15)..(15): Xaa can be Cys or D-Cys
AGXCEWXCTPACTGXY

SEQ ID NO: 2589 - protein, 15 aa, Artificial Sequence
  Synthetically generated peptide
AKCCEVCCNPACTGC

SEQ ID NO: 2590 - protein, 16 aa, Artificial Sequence
  Synthetically generated peptide
AKCCEVCCNPACTGCK

SEQ ID NO: 2591 - protein, 16 aa, Artificial Sequence
  Synthetically generated peptide
AKCCEVCCNPACTGCY

SEQ ID NO: 2592 - protein, 15 aa, Artificial Sequence
  Synthetically generated peptide
  misc_feature (15)..(15): Xaa can be Cys or D-Cys
AKCCEVCCNPACTGX

SEQ ID NO: 2593 - protein, 16 aa, Artificial Sequence
  Synthetically generated peptide
  misc_feature (15)..(15): Xaa can be Cys or D-Cys
AKCCEVCCNPACTGXK

SEQ ID NO: 2594 - protein, 16 aa, Artificial Sequence
  Synthetically generated peptide
  misc_feature (15)..(15): Xaa can be Cys or D-Cys
AKCCEVCCNPACTGXY

SEQ ID NO: 2595 - protein, 15 aa, Artificial Sequence
  Synthetically generated peptide
AKCCEVCCTPACTGC

SEQ ID NO: 2596 - protein, 16 aa, Artificial Sequence
  Synthetically generated peptide
AKCCEVCCTPACTGCK

SEQ ID NO: 2597 - protein, 16 aa, Artificial Sequence
  Synthetically generated peptide
AKCCEVCCTPACTGCY

SEQ ID NO: 2598 - protein, 15 aa, Artificial Sequence
  Synthetically generated peptide
  misc_feature (15)..(15): Xaa can be Cys or D-Cys
AKCCEVCCTPACTGX

SEQ ID NO: 2599 - protein, 16 aa, Artificial Sequence
  Synthetically generated peptide
  misc_feature (15)..(15): Xaa can be Cys or D-Cys
AKCCEVCCTPACTGXK

SEQ ID NO: 2600 - protein, 16 aa, Artificial Sequence
  Synthetically generated peptide
  misc_feature (15)..(15): Xaa can be Cys or D-Cys
AKCCEVCCTPACTGXY

SEQ ID NO: 2601 - protein, 15 aa, Artificial Sequence
  Synthetically generated peptide
  misc_feature (7)..(7): Xaa can be Cys or D-Cys
AKCCEVXCNPACTGC

SEQ ID NO: 2602 - protein, 16 aa, Artificial Sequence
  Synthetically generated peptide
  misc_feature (7)..(7): Xaa can be Cys or D-Cys
AKCCEVXCNPACTGCK

SEQ ID NO: 2603 - protein, 16 aa, Artificial Sequence
  Synthetically generated peptide
  misc_feature (7)..(7): Xaa can be Cys or D-Cys
AKCCEVXCNPACTGCY

SEQ ID NO: 2604 - protein, 15 aa, Artificial Sequence
  Synthetically generated peptide
  misc_feature (7)..(7): Xaa can be Cys or D-Cys
  misc_feature (15)..(15): Xaa can be Cys or D-Cys
AKCCEVXCNPACTGX

SEQ ID NO: 2605 - protein, 16 aa, Artificial Sequence
  Synthetically generated peptide
  misc_feature (7)..(7): Xaa can be Cys or D-Cys
  misc_feature (15)..(15): Xaa can be Cys or D-Cys
AKCCEVXCNPACTGXK

SEQ ID NO: 2606 - protein, 16 aa, Artificial Sequence
  Synthetically generated peptide
  misc_feature (7)..(7): Xaa can be Cys or D-Cys
  misc_feature (15)..(15): Xaa can be Cys or D-Cys
AKCCEVXCNPACTGXY

SEQ ID NO: 2607 - protein, 15 aa, Artificial Sequence
  Synthetically generated peptide
  misc_feature (7)..(7): Xaa can be Cys or D-Cys
AKCCEVXCTPACTGC

SEQ ID NO: 2608 - protein, 16 aa, Artificial Sequence
  Synthetically generated peptide
  misc_feature (7)..(7): Xaa can be Cys or D-Cys
AKCCEVXCTPACTGCK

SEQ ID NO: 2609 - protein, 16 aa, Artificial Sequence
  Synthetically generated peptide
  misc_feature (7)..(7): Xaa can be Cys or D-Cys
AKCCEVXCTPACTGCY

SEQ ID NO: 2610 - protein, 15 aa, Artificial Sequence
  Synthetically generated peptide
  misc_feature (7)..(7): Xaa can be Cys or D-Cys
  misc_feature (15)..(15): Xaa can be Cys or D-Cys
AKCCEVXCTPACTGX

SEQ ID NO: 2611 - protein, 16 aa, Artificial Sequence
  Synthetically generated peptide
  misc_feature (7)..(7): Xaa can be Cys or D-Cys
  misc_feature (15)..(15): Xaa can be Cys or D-Cys
AKCCEVXCTPACTGXK

SEQ ID NO: 2612 - protein, 16 aa, Artificial Sequence
  Synthetically generated peptide
  misc_feature (7)..(7): Xaa can be Cys or D-Cys
  misc_feature (15)..(15): Xaa can be Cys or D-Cys
AKCCEVXCTPACTGXY

SEQ ID NO: 2613 - protein, 15 aa, Artificial Sequence
  Synthetically generated peptide
AKCCEICCNPACTGC

SEQ ID NO: 2614 - protein, 16 aa, Artificial Sequence
  Synthetically generated peptide
AKCCEICCNPACTGCK

SEQ ID NO: 2615 - protein, 16 aa, Artificial Sequence
  Synthetically generated peptide
AKCCEICCNPACTGCY

SEQ ID NO: 2616 - protein, 15 aa, Artificial Sequence
  Synthetically generated peptide
  misc_feature (15)..(15): Xaa can be Cys or D-Cys
AKCCEICCNPACTGX

SEQ ID NO: 2617 - protein, 16 aa, Artificial Sequence
  Synthetically generated peptide
  misc_feature (15)..(15): Xaa can be Cys or D-Cys
AKCCEICCNPACTGXK

SEQ ID NO: 2618 - protein, 16 aa, Artificial Sequence
  Synthetically generated peptide
  misc_feature (15)..(15): Xaa can be Cys or D-Cys
AKCCEICCNPACTGXY

SEQ ID NO: 2619 - protein, 15 aa, Artificial Sequence
  Synthetically generated peptide
AKCCEICCTPACTGC

SEQ ID NO: 2620 - protein, 16 aa, Artificial Sequence
  Synthetically generated peptide
AKCCEICCTPACTGCK

SEQ ID NO: 2621 - protein, 16 aa, Artificial Sequence
  Synthetically generated peptide
AKCCEICCTPACTGCY

SEQ ID NO: 2622 - protein, 15 aa, Artificial Sequence
  Synthetically generated peptide
  misc_feature (15)..(15): Xaa can be Cys or D-Cys
AKCCEICCTPACTGX

SEQ ID NO: 2623 - protein, 16 aa, Artificial Sequence
  Synthetically generated peptide
  misc_feature (15)..(15): Xaa can be Cys or D-Cys
AKCCEICCTPACTGXK

SEQ ID NO: 2624 - protein, 16 aa, Artificial Sequence
  Synthetically generated peptide
  misc_feature (15)..(15): Xaa can be Cys or D-Cys
AKCCEICCTPACTGXY

SEQ ID NO: 2625 - protein, 15 aa, Artificial Sequence
  Synthetically generated peptide
  misc_feature (7)..(7): Xaa can be Cys or D-Cys
AKCCEIXCNPACTGC

SEQ ID NO: 2626 - protein, 16 aa, Artificial Sequence
  Synthetically generated peptide
  misc_feature (7)..(7): Xaa can be Cys or D-Cys
AKCCEIXCNPACTGCK

SEQ ID NO: 2627 - protein, 16 aa, Artificial Sequence
  Synthetically generated peptide
  misc_feature (7)..(7): Xaa can be Cys or D-Cys
AKCCEIXCNPACTGCY

SEQ ID NO: 2628 - protein, 15 aa, Artificial Sequence
  Synthetically generated peptide
  misc_feature (7)..(7): Xaa can be Cys or D-Cys
  misc_feature (15)..(15): Xaa can be Cys or D-Cys
AKCCEIXCNPACTGX

SEQ ID NO: 2629 - protein, 16 aa, Artificial Sequence
  Synthetically generated peptide
  misc_feature (7)..(7): Xaa can be Cys or D-Cys
  misc_feature (15)..(15): Xaa can be Cys or D-Cys
AKCCEIXCNPACTGXK

SEQ ID NO: 2630 - protein, 16 aa, Artificial Sequence
  Synthetically generated peptide
  misc_feature (7)..(7): Xaa can be Cys or D-Cys
  misc_feature (15)..(15): Xaa can be Cys or D-Cys
AKCCEIXCNPACTGXY

SEQ ID NO: 2631 - protein, 15 aa, Artificial Sequence
  Synthetically generated peptide
  misc_feature (7)..(7): Xaa can be Cys or D-Cys
AKCCEIXCTPACTGC

SEQ ID NO: 2632 - protein, 16 aa, Artificial Sequence
  Synthetically generated peptide
  misc_feature (7)..(7): Xaa can be Cys or D-Cys
AKCCEIXCTPACTGCK

SEQ ID NO: 2633 - protein, 16 aa, Artificial Sequence
  Synthetically generated peptide
  misc_feature (7)..(7): Xaa can be Cys or D-Cys
AKCCEIXCTPACTGCY

SEQ ID NO: 2634 - protein, 15 aa, Artificial Sequence
  Synthetically generated peptide
  misc_feature (7)..(7): Xaa can be Cys or D-Cys
  misc_feature (15)..(15): Xaa can be Cys or D-Cys
AKCCEIXCTPACTGX

SEQ ID NO: 2635 - protein, 16 aa, Artificial Sequence
  Synthetically generated peptide
  misc_feature (7)..(7): Xaa can be Cys or D-Cys
  misc_feature (15)..(15): Xaa can be Cys or D-Cys
AKCCEIXCTPACTGXK

SEQ ID NO: 2636 - protein, 16 aa, Artificial Sequence
  Synthetically generated peptide
  misc_feature (7)..(7): Xaa can be Cys or D-Cys
  misc_feature (15)..(15): Xaa can be Cys or D-Cys
AKCCEIXCTPACTGXY

SEQ ID NO: 2637 - protein, 15 aa, Artificial Sequence
  Synthetically generated peptide
AKCCELCCNPACTGC

SEQ ID NO: 2638 - protein, 16 aa, Artificial Sequence
  Synthetically generated peptide
AKCCELCCNPACTGCK

SEQ ID NO: 2639 - protein, 16 aa, Artificial Sequence
  Synthetically generated peptide
AKCCELCCNPACTGCY

SEQ ID NO: 2640 - protein, 15 aa, Artificial Sequence
  Synthetically generated peptide
  misc_feature (15)..(15): Xaa can be Cys or D-Cys
AKCCELCCNPACTGX

SEQ ID NO: 2641 - protein, 16 aa, Artificial Sequence
  Synthetically generated peptide
  misc_feature (15)..(15): Xaa can be Cys or D-Cys
AKCCELCCNPACTGXK

SEQ ID NO: 2642 - protein, 16 aa, Artificial Sequence
  Synthetically generated peptide
  misc_feature (15)..(15): Xaa can be Cys or D-Cys
AKCCELCCNPACTGXY

SEQ ID NO: 2643 - protein, 15 aa, Artificial Sequence
  Synthetically generated peptide
AKCCELCCTPACTGC

SEQ ID NO: 2644 - protein, 16 aa, Artificial Sequence
  Synthetically generated peptide
AKCCELCCTPACTGCK

SEQ ID NO: 2645 - protein, 16 aa, Artificial Sequence
  Synthetically generated peptide
AKCCELCCTPACTGCY

SEQ ID NO: 2646 - protein, 15 aa, Artificial Sequence
  Synthetically generated peptide
  misc_feature (15)..(15): Xaa can be Cys or D-Cys
AKCCELCCTPACTGX

SEQ ID NO: 2647 - protein, 16 aa, Artificial Sequence
  Synthetically generated peptide
  misc_feature (15)..(15): Xaa can be Cys or D-Cys
AKCCELCCTPACTGXK

SEQ ID NO: 2648 - protein, 16 aa, Artificial Sequence
  Synthetically generated peptide
  misc_feature (15)..(15): Xaa can be Cys or D-Cys
AKCCELCCTPACTGXY

SEQ ID NO: 2649 - protein, 15 aa, Artificial Sequence
  Synthetically generated peptide
  misc_feature (7)..(7): Xaa can be Cys or D-Cys
AKCCELXCNPACTGC

SEQ ID NO: 2650 - protein, 16 aa, Artificial Sequence
  Synthetically generated peptide
  misc_feature (7)..(7): Xaa can be Cys or D-Cys
AKCCELXCNPACTGCK

SEQ ID NO: 2651 - protein, 16 aa, Artificial Sequence
  Synthetically generated peptide
  misc_feature (7)..(7): Xaa can be Cys or D-Cys
AKCCELXCNPACTGCY

SEQ ID NO: 2652 - protein, 15 aa, Artificial Sequence
  Synthetically generated peptide
  misc_feature (7)..(7): Xaa can be Cys or D-Cys
  misc_feature (15)..(15): Xaa can be Cys or D-Cys
AKCCELXCNPACTGX

SEQ ID NO: 2653 - protein, 16 aa, Artificial Sequence
  Synthetically generated peptide
  misc_feature (7)..(7): Xaa can be Cys or D-Cys
  misc_feature (15)..(15): Xaa can be Cys or D-Cys
AKCCELXCNPACTGXK

SEQ ID NO: 2654 - protein, 16 aa, Artificial Sequence
  Synthetically generated peptide
  misc_feature (7)..(7): Xaa can be Cys or D-Cys
  misc_feature (15)..(15): Xaa can be Cys or D-Cys
AKCCELXCNPACTGXY

SEQ ID NO: 2655 - protein, 15 aa, Artificial Sequence
  Synthetically generated peptide
  misc_feature (7)..(7): Xaa can be Cys or D-Cys
AKCCELXCTPACTGC

SEQ ID NO: 2656 - protein, 16 aa, Artificial Sequence
  Synthetically generated peptide
  misc_feature (7)..(7): Xaa can be Cys or D-Cys
AKCCELXCTPACTGCK

SEQ ID NO: 2657 - protein, 16 aa, Artificial Sequence
  Synthetically generated peptide
  misc_feature (7)..(7): Xaa can be Cys or D-Cys
AKCCELXCTPACTGCY

SEQ ID NO: 2658 - protein, 15 aa, Artificial Sequence
  Synthetically generated peptide
  misc_feature (7)..(7): Xaa can be Cys or D-Cys
  misc_feature (15)..(15): Xaa can be Cys or D-Cys
AKCCELXCTPACTGX

SEQ ID NO: 2659 - protein, 16 aa, Artificial Sequence
  Synthetically generated peptide
  misc_feature (7)..(7): Xaa can be Cys or D-Cys
  misc_feature (15)..(15): Xaa can be Cys or D-Cys
AKCCELXCTPACTGXK

SEQ ID NO: 2660 - protein, 16 aa, Artificial Sequence
  Synthetically generated peptide
  misc_feature (7)..(7): Xaa can be Cys or D-Cys
  misc_feature (15)..(15): Xaa can be Cys or D-Cys
AKCCELXCTPACTGXY

SEQ ID NO: 2661 - protein, 15 aa, Artificial Sequence
  Synthetically generated peptide
AKCCEYCCNPACTGC

SEQ ID NO: 2662 - protein, 16 aa, Artificial Sequence
  Synthetically generated peptide
AKCCEYCCNPACTGCK

SEQ ID NO: 2663 - protein, 16 aa, Artificial Sequence
  Synthetically generated peptide
AKCCEYCCNPACTGCY

SEQ ID NO: 2664 - protein, 15 aa, Artificial Sequence
  Synthetically generated peptide
  misc_feature (15)..(15): Xaa can be Cys or D-Cys
AKCCEYCCNPACTGX

SEQ ID NO: 2665 - protein, 16 aa, Artificial Sequence
  Synthetically generated peptide
  misc_feature (15)..(15): Xaa can be Cys or D-Cys
AKCCEYCCNPACTGXK

SEQ ID NO: 2666 - protein, 16 aa, Artificial Sequence
  Synthetically generated peptide
  misc_feature (15)..(15): Xaa can be Cys or D-Cys
AKCCEYCCNPACTGXY

SEQ ID NO: 2667 - protein, 15 aa, Artificial Sequence
  Synthetically generated peptide
AKCCEYCCTPACTGC

SEQ ID NO: 2668 - protein, 16 aa, Artificial Sequence
  Synthetically generated peptide
AKCCEYCCTPACTGCK

SEQ ID NO: 2669 - protein, 16 aa, Artificial Sequence
  Synthetically generated peptide
AKCCEYCCTPACTGCY

SEQ ID NO: 2670 - protein, 15 aa, Artificial Sequence
  Synthetically generated peptide
  misc_feature (15)..(15): Xaa can be Cys or D-Cys
AKCCEYCCTPACTGX

SEQ ID NO: 2671 - protein, 16 aa, Artificial Sequence
  Synthetically generated peptide
  misc_feature (15)..(15): Xaa can be Cys or D-Cys
AKCCEYCCTPACTGXK

SEQ ID NO: 2672 - protein, 16 aa, Artificial Sequence
  Synthetically generated peptide
  misc_feature (15)..(15): Xaa can be Cys or D-Cys
AKCCEYCCTPACTGXY

SEQ ID NO: 2673 - protein, 15 aa, Artificial Sequence
  Synthetically generated peptide
  misc_feature (7)..(7): Xaa can be Cys or D-Cys
AKCCEYXCNPACTGC

SEQ ID NO: 2674 - protein, 16 aa, Artificial Sequence
  Synthetically generated peptide
  misc_feature (7)..(7): Xaa can be Cys or D-Cys
AKCCEYXCNPACTGCK

SEQ ID NO: 2675 - protein, 16 aa, Artificial Sequence
  Synthetically generated peptide
  misc_feature (7)..(7): Xaa can be Cys or D-Cys
AKCCEYXCNPACTGCY

SEQ ID NO: 2676 - protein, 15 aa, Artificial Sequence
  Synthetically generated peptide
  misc_feature (7)..(7): Xaa can be Cys or D-Cys
  misc_feature (15)..(15): Xaa can be Cys or D-Cys
AKCCEYXCNPACTGX

SEQ ID NO: 2677 - protein, 16 aa, Artificial Sequence
  Synthetically generated peptide
  misc_feature (7)..(7): Xaa can be Cys or D-Cys
  misc_feature (15)..(15): Xaa can be Cys or D-Cys
AKCCEYXCNPACTGXK

SEQ ID NO: 2678 - protein, 16 aa, Artificial Sequence
  Synthetically generated peptide
  misc_feature (7)..(7): Xaa can be Cys or D-Cys
  misc_feature (15)..(15): Xaa can be Cys or D-Cys
AKCCEYXCNPACTGXY

SEQ ID NO: 2679 - protein, 15 aa, Artificial Sequence
  Synthetically generated peptide
  misc_feature (7)..(7): Xaa can be Cys or D-Cys
AKCCEYXCTPACTGC

SEQ ID NO: 2680 - protein, 16 aa, Artificial Sequence
  Synthetically generated peptide
  misc_feature (7)..(7): Xaa can be Cys or D-Cys
AKCCEYXCTPACTGCK

SEQ ID NO: 2681 - protein, 16 aa, Artificial Sequence
  Synthetically generated peptide
  misc_feature (7)..(7): Xaa can be Cys or D-Cys
AKCCEYXCTPACTGCY

SEQ ID NO: 2682 - protein, 15 aa, Artificial Sequence
  Synthetically generated peptide
  misc_feature (7)..(7): Xaa can be Cys or D-Cys
  misc_feature (15)..(15): Xaa can be Cys or D-Cys
AKCCEYXCTPACTGX

SEQ ID NO: 2683 - protein, 16 aa, Artificial Sequence
  Synthetically generated peptide
  misc_feature (7)..(7): Xaa can be Cys or D-Cys
  misc_feature (15)..(15): Xaa can be Cys or D-Cys
AKCCEYXCTPACTGXK

SEQ ID NO: 2684 - protein, 16 aa, Artificial Sequence
  Synthetically generated peptide
  misc_feature (7)..(7): Xaa can be Cys or D-Cys
  misc_feature (15)..(15): Xaa can be Cys or D-Cys
AKCCEYXCTPACTGXY

SEQ ID NO: 2685 - protein, 15 aa, Artificial Sequence
  Synthetically generated peptide
AKCCEFCCNPACTGC

SEQ ID NO: 2686 - protein, 16 aa, Artificial Sequence
  Synthetically generated peptide
AKCCEFCCNPACTGCK

SEQ ID NO: 2687 - protein, 16 aa, Artificial Sequence
  Synthetically generated peptide
AKCCEFCCNPACTGCY

SEQ ID NO: 2688 - protein, 15 aa, Artificial Sequence
  Synthetically generated peptide
  misc_feature (15)..(15): Xaa can be Cys or D-Cys
AKCCEFCCNPACTGX

SEQ ID NO: 2689 - protein, 16 aa, Artificial Sequence
  Synthetically generated peptide
  misc_feature (15)..(15): Xaa can be Cys or D-Cys
AKCCEFCCNPACTGXK

SEQ ID NO: 2690 - protein, 16 aa, Artificial Sequence
  Synthetically generated peptide
  misc_feature (15)..(15): Xaa can be Cys or D-Cys
AKCCEFCCNPACTGXY

SEQ ID NO: 2691 - protein, 15 aa, Artificial Sequence
  Synthetically generated peptide
AKCCEFCCTPACTGC

SEQ ID NO: 2692 - protein, 16 aa, Artificial Sequence
  Synthetically generated peptide
AKCCEFCCTPACTGCK

SEQ ID NO: 2693 - protein, 16 aa, Artificial Sequence
  Synthetically generated peptide
AKCCEFCCTPACTGCY

SEQ ID NO: 2694 - protein, 15 aa, Artificial Sequence
  Synthetically generated peptide
  misc_feature (15)..(15): Xaa can be Cys or D-Cys
AKCCEFCCTPACTGX

SEQ ID NO: 2695 - protein, 16 aa, Artificial Sequence
  Synthetically generated peptide
  misc_feature (15)..(15): Xaa can be Cys or D-Cys
AKCCEFCCTPACTGXK

SEQ ID NO: 2696 - protein, 16 aa, Artificial Sequence
  Synthetically generated peptide
  misc_feature (15)..(15): Xaa can be Cys or D-Cys
AKCCEFCCTPACTGXY

SEQ ID NO: 2697 - protein, 15 aa, Artificial Sequence
  Synthetically generated peptide
  misc_feature (7)..(7): Xaa can be Cys or D-Cys
AKCCEFXCNPACTGC

SEQ ID NO: 2698 - protein, 16 aa, Artificial Sequence
  Synthetically generated peptide
  misc_feature (7)..(7): Xaa can be Cys or D-Cys
AKCCEFXCNPACTGCK

SEQ ID NO: 2699 - protein, 16 aa, Artificial Sequence
  Synthetically generated peptide
  misc_feature (7)..(7): Xaa can be Cys or D-Cys
AKCCEFXCNPACTGCY

SEQ ID NO: 2700 - protein, 15 aa, Artificial Sequence
  Synthetically generated peptide
  misc_feature (7)..(7): Xaa can be Cys or D-Cys
  misc_feature (15)..(15): Xaa can be Cys or D-Cys
AKCCEFXCNPACTGX

SEQ ID NO: 2701 - protein, 16 aa, Artificial Sequence
  Synthetically generated peptide
  misc_feature (7)..(7): Xaa can be Cys or D-Cys
  misc_feature (15)..(15): Xaa can be Cys or D-Cys
AKCCEFXCNPACTGXK

SEQ ID NO: 2702 - protein, 16 aa, Artificial Sequence
  Synthetically generated peptide
  misc_feature (7)..(7): Xaa can be Cys or D-Cys
  misc_feature (15)..(15): Xaa can be Cys or D-Cys
AKCCEFXCNPACTGXY

SEQ ID NO: 2703 - protein, 15 aa, Artificial Sequence
  Synthetically generated peptide
  misc_feature (7)..(7): Xaa can be Cys or D-Cys
AKCCEFXCTPACTGC

SEQ ID NO: 2704 - protein, 16 aa, Artificial Sequence
  Synthetically generated peptide
  misc_feature (7)..(7): Xaa can be Cys or D-Cys
AKCCEFXCTPACTGCK

SEQ ID NO: 2705 - protein, 16 aa, Artificial Sequence
  Synthetically generated peptide
  misc_feature (7)..(7): Xaa can be Cys or D-Cys
AKCCEFXCTPACTGCY

SEQ ID NO: 2706 - protein, 15 aa, Artificial Sequence
  Synthetically generated peptide
  misc_feature (7)..(7): Xaa can be Cys or D-Cys
  misc_feature (15)..(15): Xaa can be Cys or D-Cys
AKCCEFXCTPACTGX

SEQ ID NO: 2707 - protein, 16 aa, Artificial Sequence
  Synthetically generated peptide
  misc_feature (7)..(7): Xaa can be Cys or D-Cys
  misc_feature (15)..(15): Xaa can be Cys or D-Cys
AKCCEFXCTPACTGXK

SEQ ID NO: 2708 - protein, 16 aa, Artificial Sequence
  Synthetically generated peptide
  misc_feature (7)..(7): Xaa can be Cys or D-Cys
  misc_feature (15)..(15): Xaa can be Cys or D-Cys
AKCCEFXCTPACTGXY

SEQ ID NO: 2709 - protein, 15 aa, Artificial Sequence
  Synthetically generated peptide
AKCCEWCCNPACTGC

SEQ ID NO: 2710 - protein, 16 aa, Artificial Sequence
  Synthetically generated peptide
AKCCEWCCNPACTGCK

SEQ ID NO: 2711 - protein, 16 aa, Artificial Sequence
  Synthetically generated peptide
AKCCEWCCNPACTGCY

SEQ ID NO: 2712 - protein, 15 aa, Artificial Sequence
  Synthetically generated peptide
  misc_feature (15)..(15): Xaa can be Cys or D-Cys
AKCCEWCCNPACTGX

SEQ ID NO: 2713 - protein, 16 aa, Artificial Sequence
  Synthetically generated peptide
  misc_feature (15)..(15): Xaa can be Cys or D-Cys
AKCCEWCCNPACTGXK

SEQ ID NO: 2714 - protein, 16 aa, Artificial Sequence
  Synthetically generated peptide
  misc_feature (15)..(15): Xaa can be Cys or D-Cys
AKCCEWCCNPACTGXY

SEQ ID NO: 2715 - protein, 15 aa, Artificial Sequence
  Synthetically generated peptide
AKCCEWCCTPACTGC

SEQ ID NO: 2716 - protein, 16 aa, Artificial Sequence
  Synthetically generated peptide
AKCCEWCCTPACTGCK

SEQ ID NO: 2717 - protein, 16 aa, Artificial Sequence
  Synthetically generated peptide
AKCCEWCCTPACTGCY

SEQ ID NO: 2718 - protein, 15 aa, Artificial Sequence
  Synthetically generated peptide
  misc_feature (15)..(15): Xaa can be Cys or D-Cys
AKCCEWCCTPACTGX

SEQ ID NO: 2719 - protein, 16 aa, Artificial Sequence
  Synthetically generated peptide
  misc_feature (15)..(15): Xaa can be Cys or D-Cys
AKCCEWCCTPACTGXK

SEQ ID NO: 2720 - protein, 16 aa, Artificial Sequence
  Synthetically generated peptide
  misc_feature (15)..(15): Xaa can be Cys or D-Cys
AKCCEWCCTPACTGXY

SEQ ID NO: 2721 - protein, 15 aa, Artificial Sequence
  Synthetically generated peptide
  misc_feature (7)..(7): Xaa can be Cys or D-Cys
AKCCEWXCNPACTGC

SEQ ID NO: 2722 - protein, 16 aa, Artificial Sequence
  Synthetically generated peptide
  misc_feature (7)..(7): Xaa can be Cys or D-Cys
AKCCEWXCNPACTGCK

SEQ ID NO: 2723 - protein, 16 aa, Artificial Sequence
  Synthetically generated peptide
  misc_feature (7)..(7): Xaa can be Cys or D-Cys
AKCCEWXCNPACTGCY

SEQ ID NO: 2724 - protein, 15 aa, Artificial Sequence
  Synthetically generated peptide
  misc_feature (7)..(7): Xaa can be Cys or D-Cys
  misc_feature (15)..(15): Xaa can be Cys or D-Cys
AKCCEWXCNPACTGX

SEQ ID NO: 2725 - protein, 16 aa, Artificial Sequence
  Synthetically generated peptide
  misc_feature (7)..(7): Xaa can be Cys or D-Cys
  misc_feature (15)..(15): Xaa can be Cys or D-Cys
AKCCEWXCNPACTGXK

SEQ ID NO: 2726 - protein, 16 aa, Artificial Sequence
  Synthetically generated peptide
  misc_feature (7)..(7): Xaa can be Cys or D-Cys
  misc_feature (15)..(15): Xaa can be Cys or D-Cys
AKCCEWXCNPACTGXY

SEQ ID NO: 2727 - protein, 15 aa, Artificial Sequence
  Synthetically generated peptide
  misc_feature (7)..(7): Xaa can be Cys or D-Cys
AKCCEWXCTPACTGC

SEQ ID NO: 2728 - protein, 16 aa, Artificial Sequence
  Synthetically generated peptide
  misc_feature (7)..(7): Xaa can be Cys or D-Cys
AKCCEWXCTPACTGCK

SEQ ID NO: 2729 - protein, 16 aa, Artificial Sequence
  Synthetically generated peptide
  misc_feature (7)..(7): Xaa can be Cys or D-Cys
AKCCEWXCTPACTGCY

SEQ ID NO: 2730 - protein, 15 aa, Artificial Sequence
  Synthetically generated peptide
  misc_feature (7)..(7): Xaa can be Cys or D-Cys
  misc_feature (15)..(15): Xaa can be Cys or D-Cys
AKCCEWXCTPACTGX

SEQ ID NO: 2731 - protein, 16 aa, Artificial Sequence
  Synthetically generated peptide
  misc_feature (7)..(7): Xaa can be Cys or D-Cys
  misc_feature (15)..(15): Xaa can be Cys or D-Cys
AKCCEWXCTPACTGXK

SEQ ID NO: 2732 - protein, 16 aa, Artificial Sequence
  Synthetically generated peptide
  misc_feature (7)..(7): Xaa can be Cys or D-Cys
  misc_feature (15)..(15): Xaa can be Cys or D-Cys
AKCCEWXCTPACTGXY

SEQ ID NO: 2733 - protein, 15 aa, Artificial Sequence
  Synthetically generated peptide
  misc_feature (3)..(3): Xaa can be Cys or D-Cys
AKXCEVCCNPACTGC

SEQ ID NO: 2734 - protein, 16 aa, Artificial Sequence
  Synthetically generated peptide
  misc_feature (3)..(3): Xaa can be Cys or D-Cys
AKXCEVCCNPACTGCK

SEQ ID NO: 2735 - protein, 16 aa, Artificial Sequence
  Synthetically generated peptide
  misc_feature (3)..(3): Xaa can be Cys or D-Cys
AKXCEVCCNPACTGCY

SEQ ID NO: 2736 - protein, 15 aa, Artificial Sequence
  Synthetically generated peptide
  misc_feature (3)..(3): Xaa can be Cys or D-Cys
  misc_feature (15)..(15): Xaa can be Cys or D-Cys
AKXCEVCCNPACTGX

SEQ ID NO: 2737 - protein, 16 aa, Artificial Sequence
  Synthetically generated peptide
  misc_feature (3)..(3): Xaa can be Cys or D-Cys
  misc_feature (15)..(15): Xaa can be Cys or D-Cys
AKXCEVCCNPACTGXK

SEQ ID NO: 2738 - protein, 16 aa, Artificial Sequence
  Synthetically generated peptide
  misc_feature (3)..(3): Xaa can be Cys or D-Cys
  misc_feature (15)..(15): Xaa can be Cys or D-Cys
AKXCEVCCNPACTGXY

SEQ ID NO: 2739 - protein, 15 aa, Artificial Sequence
  Synthetically generated peptide
  misc_feature (3)..(3): Xaa can be Cys or D-Cys
AKXCEVCCTPACTGC

SEQ ID NO: 2740 - protein, 16 aa, Artificial Sequence
  Synthetically generated peptide
  misc_feature (3)..(3): Xaa can be Cys or D-Cys
AKXCEVCCTPACTGCK

SEQ ID NO: 2741 - protein, 16 aa, Artificial Sequence
  Synthetically generated peptide
  misc_feature (3)..(3): Xaa can be Cys or D-Cys
AKXCEVCCTPACTGCY

SEQ ID NO: 2742 - protein, 15 aa, Artificial Sequence
  Synthetically generated peptide
  misc_feature (3)..(3): Xaa can be Cys or D-Cys
  misc_feature (15)..(15): Xaa can be Cys or D-Cys
AKXCEVCCTPACTGX

SEQ ID NO: 2743 - protein, 16 aa, Artificial Sequence
  Synthetically generated peptide
  misc_feature (3)..(3): Xaa can be Cys or D-Cys
  misc_feature (15)..(15): Xaa can be Cys or D-Cys
AKXCEVCCTPACTGXK

SEQ ID NO: 2744 - protein, 16 aa, Artificial Sequence
  Synthetically generated peptide
  misc_feature (3)..(3): Xaa can be Cys or D-Cys
  misc_feature (15)..(15): Xaa can be Cys or D-Cys
AKXCEVCCTPACTGXY

SEQ ID NO: 2745 - protein, 15 aa, Artificial Sequence
  Synthetically generated peptide
  misc_feature (3)..(3): Xaa can be Cys or D-Cys
  misc_feature (7)..(7): Xaa can be Cys or D-Cys
AKXCEVXCNPACTGC

SEQ ID NO: 2746 - protein, 16 aa, Artificial Sequence
  Synthetically generated peptide
  misc_feature (3)..(3): Xaa can be Cys or D-Cys
  misc_feature (7)..(7): Xaa can be Cys or D-Cys
AKXCEVXCNPACTGCK

SEQ ID NO: 2747 - protein, 16 aa, Artificial Sequence
  Synthetically generated peptide
  misc_feature (3)..(3): Xaa can be Cys or D-Cys
  misc_feature (7)..(7): Xaa can be Cys or D-Cys
AKXCEVXCNPACTGCY

SEQ ID NO: 2748 - protein, 15 aa, Artificial Sequence
  Synthetically generated peptide
  misc_feature (3)..(3): Xaa can be Cys or D-Cys
  misc_feature (7)..(7): Xaa can be Cys or D-Cys
  misc_feature (15)..(15): Xaa can be Cys or D-Cys
AKXCEVXCNPACTGX

SEQ ID NO: 2749 - protein, 16 aa, Artificial Sequence
  Synthetically generated peptide
  misc_feature (3)..(3): Xaa can be Cys or D-Cys
  misc_feature (7)..(7): Xaa can be Cys or D-Cys
  misc_feature (15)..(15): Xaa can be Cys or D-Cys
AKXCEVXCNPACTGXK

SEQ ID NO: 2750 - protein, 16 aa, Artificial Sequence
  Synthetically generated peptide
  misc_feature (3)..(3): Xaa can be Cys or D-Cys
  misc_feature (7)..(7): Xaa can be Cys or D-Cys
  misc_feature (15)..(15): Xaa can be Cys or D-Cys
AKXCEVXCNPACTGXY

SEQ ID NO: 2751 - protein, 15 aa, Artificial Sequence
  Synthetically generated peptide
  misc_feature (3)..(3): Xaa can be Cys or D-Cys
  misc_feature (7)..(7): Xaa can be Cys or D-Cys
AKXCEVXCTPACTGC

SEQ ID NO: 2752 - protein, 16 aa, Artificial Sequence
  Synthetically generated peptide
  misc_feature (3)..(3): Xaa can be Cys or D-Cys
  misc_feature (7)..(7): Xaa can be Cys or D-Cys
AKXCEVXCTPACTGCK

SEQ ID NO: 2753 - protein, 16 aa, Artificial Sequence
  Synthetically generated peptide
  misc_feature (3)..(3): Xaa can be Cys or D-Cys
  misc_feature (7)..(7): Xaa can be Cys or D-Cys
AKXCEVXCTPACTGCY

SEQ ID NO: 2754 - protein, 15 aa, Artificial Sequence
  Synthetically generated peptide
  misc_feature (3)..(3): Xaa can be Cys or D-Cys
  misc_feature (7)..(7): Xaa can be Cys or D-Cys
  misc_feature (15)..(15): Xaa can be Cys or D-Cys
AKXCEVXCTPACTGX

SEQ ID NO: 2755 - protein, 16 aa, Artificial Sequence
  Synthetically generated peptide
  misc_feature (3)..(3): Xaa can be Cys or D-Cys
  misc_feature (7)..(7): Xaa can be Cys or D-Cys
  misc_feature (15)..(15): Xaa can be Cys or D-Cys
AKXCEVXCTPACTGXK

SEQ ID NO: 2756 - protein, 16 aa, Artificial Sequence
  Synthetically generated peptide
  misc_feature (3)..(3): Xaa can be Cys or D-Cys
  misc_feature (7)..(7): Xaa can be Cys or D-Cys
  misc_feature (15)..(15): Xaa can be Cys or D-Cys
AKXCEVXCTPACTGXY

SEQ ID NO: 2757 - protein, 15 aa, Artificial Sequence
  Synthetically generated peptide
  misc_feature (3)..(3): Xaa can be Cys or D-Cys
AKXCEICCNPACTGC

SEQ ID NO: 2758 - protein, 16 aa, Artificial Sequence
  Synthetically generated peptide
  misc_feature (3)..(3): Xaa can be Cys or D-Cys
AKXCEICCNPACTGCK

SEQ ID NO: 2759 - protein, 16 aa, Artificial Sequence
  Synthetically generated peptide
  misc_feature (3)..(3): Xaa can be Cys or D-Cys
AKXCEICCNPACTGCY

SEQ ID NO: 2760 - protein, 15 aa, Artificial Sequence
  Synthetically generated peptide
  misc_feature (3)..(3): Xaa can be Cys or D-Cys
  misc_feature (15)..(15): Xaa can be Cys or D-Cys
AKXCEICCNPACTGX

SEQ ID NO: 2761 - protein, 16 aa, Artificial Sequence
  Synthetically generated peptide
  misc_feature (3)..(3): Xaa can be Cys or D-Cys
  misc_feature (15)..(15): Xaa can be Cys or D-Cys
AKXCEICCNPACTGXK

SEQ ID NO: 2762 - protein, 16 aa, Artificial Sequence
  Synthetically generated peptide
  misc_feature (3)..(3): Xaa can be Cys or D-Cys
  misc_feature (15)..(15): Xaa can be Cys or D-Cys
AKXCEICCNPACTGXY

SEQ ID NO: 2763 - protein, 15 aa, Artificial Sequence
  Synthetically generated peptide
  misc_feature (3)..(3): Xaa can be Cys or D-Cys
AKXCEICCTPACTGC

SEQ ID NO: 2764 - protein, 16 aa, Artificial Sequence
  Synthetically generated peptide
  misc_feature (3)..(3): Xaa can be Cys or D-Cys
AKXCEICCTPACTGCK

SEQ ID NO: 2765 - protein, 16 aa, Artificial Sequence
  Synthetically generated peptide
  misc_feature (3)..(3): Xaa can be Cys or D-Cys
AKXCEICCTPACTGCY

SEQ ID NO: 2766 - protein, 15 aa, Artificial Sequence
  Synthetically generated peptide
  misc_feature (3)..(3): Xaa can be Cys or D-Cys
  misc_feature (15)..(15): Xaa can be Cys or D-Cys
AKXCEICCTPACTGX

SEQ ID NO: 2767 - protein, 16 aa, Artificial Sequence
  Synthetically generated peptide
  misc_feature (3)..(3): Xaa can be Cys or D-Cys
  misc_feature (15)..(15): Xaa can be Cys or D-Cys
AKXCEICCTPACTGXK

SEQ ID NO: 2768 - protein, 16 aa, Artificial Sequence
  Synthetically generated peptide
  misc_feature (3)..(3): Xaa can be Cys or D-Cys
  misc_feature (15)..(15): Xaa can be Cys or D-Cys
AKXCEICCTPACTGXY

SEQ ID NO: 2769 - protein, 15 aa, Artificial Sequence
  Synthetically generated peptide
  misc_feature (3)..(3): Xaa can be Cys or D-Cys
  misc_feature (7)..(7): Xaa can be Cys or D-Cys
AKXCEIXCNPACTGC

SEQ ID NO: 2770 - protein, 16 aa, Artificial Sequence
  Synthetically generated peptide
  misc_feature (3)..(3): Xaa can be Cys or D-Cys
  misc_feature (7)..(7): Xaa can be Cys or D-Cys
AKXCEIXCNPACTGCK

SEQ ID NO: 2771 - protein, 16 aa, Artificial Sequence
  Synthetically generated peptide
  misc_feature (3)..(3): Xaa can be Cys or D-Cys
  misc_feature (7)..(7): Xaa can be Cys or D-Cys
AKXCEIXCNPACTGCY

SEQ ID NO: 2772 - protein, 15 aa, Artificial Sequence
  Synthetically generated peptide
  misc_feature (3)..(3): Xaa can be Cys or D-Cys
  misc_feature (7)..(7): Xaa can be Cys or D-Cys
  misc_feature (15)..(15): Xaa can be Cys or D-Cys
AKXCEIXCNPACTGX

SEQ ID NO: 2773 - protein, 16 aa, Artificial Sequence
  Synthetically generated peptide
  misc_feature (3)..(3): Xaa can be Cys or D-Cys
  misc_feature (7)..(7): Xaa can be Cys or D-Cys
  misc_feature (15)..(15): Xaa can be Cys or D-Cys
AKXCEIXCNPACTGXK

SEQ ID NO: 2774 - protein, 16 aa, Artificial Sequence
  Synthetically generated peptide
  misc_feature (3)..(3): Xaa can be Cys or D-Cys
  misc_feature (7)..(7): Xaa can be Cys or D-Cys
  misc_feature (15)..(15): Xaa can be Cys or D-Cys
AKXCEIXCNPACTGXY

SEQ ID NO: 2775 - protein, 15 aa, Artificial Sequence
  Synthetically generated peptide
  misc_feature (3)..(3): Xaa can be Cys or D-Cys
  misc_feature (7)..(7): Xaa can be Cys or D-Cys
AKXCEIXCTPACTGC

SEQ ID NO: 2776 - protein, 16 aa, Artificial Sequence
  Synthetically generated peptide
  misc_feature (3)..(3): Xaa can be Cys or D-Cys
  misc_feature (7)..(7): Xaa can be Cys or D-Cys
AKXCEIXCTPACTGCK

SEQ ID NO: 2777 - protein, 16 aa, Artificial Sequence
  Synthetically generated peptide
  misc_feature (3)..(3): Xaa can be Cys or D-Cys
  misc_feature (7)..(7): Xaa can be Cys or D-Cys
AKXCEIXCTPACTGCY

SEQ ID NO: 2778 - protein, 15 aa, Artificial Sequence
  Synthetically generated peptide
  misc_feature (3)..(3): Xaa can be Cys or D-Cys
  misc_feature (7)..(7): Xaa can be Cys or D-Cys
  misc_feature (15)..(15): Xaa can be Cys or D-Cys
AKXCEIXCTPACTGX

SEQ ID NO: 2779 - protein, 16 aa, Artificial Sequence
  Synthetically generated peptide
  misc_feature (3)..(3): Xaa can be Cys or D-Cys
  misc_feature (7)..(7): Xaa can be Cys or D-Cys
  misc_feature (15)..(15): Xaa can be Cys or D-Cys
AKXCEIXCTPACTGXK

SEQ ID NO: 2780 - protein, 16 aa, Artificial Sequence
  Synthetically generated peptide
  misc_feature (3)..(3): Xaa can be Cys or D-Cys
  misc_feature (7)..(7): Xaa can be Cys or D-Cys
  misc_feature (15)..(15): Xaa can be Cys or D-Cys
AKXCEIXCTPACTGXY

SEQ ID NO: 2781 - protein, 15 aa, Artificial Sequence
  Synthetically generated peptide
  misc_feature (3)..(3): Xaa can be Cys or D-Cys
AKXCELCCNPACTGC

SEQ ID NO: 2782 - protein, 16 aa, Artificial Sequence
  Synthetically generated peptide
  misc_feature (3)..(3): Xaa can be Cys or D-Cys
AKXCELCCNPACTGCK

SEQ ID NO: 2783 - protein, 16 aa, Artificial Sequence
  Synthetically generated peptide
  misc_feature (3)..(3): Xaa can be Cys or D-Cys
AKXCELCCNPACTGCY

SEQ ID NO: 2784 - protein, 15 aa, Artificial Sequence
  Synthetically generated peptide
  misc_feature (3)..(3): Xaa can be Cys or D-Cys
  misc_feature (15)..(15): Xaa can be Cys or D-Cys
AKXCELCCNPACTGX

SEQ ID NO: 2785 - protein, 16 aa, Artificial Sequence
  Synthetically generated peptide
  misc_feature (3)..(3): Xaa can be Cys or D-Cys
  misc_feature (15)..(15): Xaa can be Cys or D-Cys
AKXCELCCNPACTGXK

SEQ ID NO: 2786 - protein, 16 aa, Artificial Sequence
  Synthetically generated peptide
  misc_feature (3)..(3): Xaa can be Cys or D-Cys
  misc_feature (15)..(15): Xaa can be Cys or D-Cys
AKXCELCCNPACTGXY

SEQ ID NO: 2787 - protein, 15 aa, Artificial Sequence
  Synthetically generated peptide
  misc_feature (3)..(3): Xaa can be Cys or D-Cys
AKXCELCCTPACTGC

SEQ ID NO: 2788 - protein, 16 aa, Artificial Sequence
  Synthetically generated peptide
  misc_feature (3)..(3): Xaa can be Cys or D-Cys
AKXCELCCTPACTGCK

SEQ ID NO: 2789 - protein, 16 aa, Artificial Sequence
  Synthetically generated peptide
  misc_feature (3)..(3): Xaa can be Cys or D-Cys
AKXCELCCTPACTGCY

SEQ ID NO: 2790 - protein, 15 aa, Artificial Sequence
  Synthetically generated peptide
  misc_feature (3)..(3): Xaa can be Cys or D-Cys
  misc_feature (15)..(15): Xaa can be Cys or D-Cys
AKXCELCCTPACTGX

SEQ ID NO: 2791 - protein, 16 aa, Artificial Sequence
  Synthetically generated peptide
  misc_feature (3)..(3): Xaa can be Cys or D-Cys
  misc_feature (15)..(15): Xaa can be Cys or D-Cys
AKXCELCCTPACTGXK

SEQ ID NO: 2792 - protein, 16 aa, Artificial Sequence
  Synthetically generated peptide
  misc_feature (3)..(3): Xaa can be Cys or D-Cys
  misc_feature (15)..(15): Xaa can be Cys or D-Cys
AKXCELCCTPACTGXY

SEQ ID NO: 2793 - protein, 15 aa, Artificial Sequence
  Synthetically generated peptide
  misc_feature (3)..(3): Xaa can be Cys or D-Cys
  misc_feature (7)..(7): Xaa can be Cys or D-Cys
AKXCELXCNPACTGC

SEQ ID NO: 2794 - protein, 16 aa, Artificial Sequence
  Synthetically generated peptide
  misc_feature (3)..(3): Xaa can be Cys or D-Cys
  misc_feature (7)..(7): Xaa can be Cys or D-Cys
AKXCELXCNPACTGCK

SEQ ID NO: 2795 - protein, 16 aa, Artificial Sequence
  Synthetically generated peptide
  misc_feature (3)..(3): Xaa can be Cys or D-Cys
  misc_feature (7)..(7): Xaa can be Cys or D-Cys
AKXCELXCNPACTGCY

SEQ ID NO: 2796 - protein, 15 aa, Artificial Sequence
  Synthetically generated peptide
  misc_feature (3)..(3): Xaa can be Cys or D-Cys
  misc_feature (7)..(7): Xaa can be Cys or D-Cys
  misc_feature (15)..(15): Xaa can be Cys or D-Cys
AKXCELXCNPACTGX

SEQ ID NO: 2797 - protein, 16 aa, Artificial Sequence
  Synthetically generated peptide
  misc_feature (3)..(3): Xaa can be Cys or D-Cys
  misc_feature (7)..(7): Xaa can be Cys or D-Cys
  misc_feature (15)..(15): Xaa can be Cys or D-Cys
AKXCELXCNPACTGXK

SEQ ID NO: 2798 - protein, 16 aa, Artificial Sequence
  Synthetically generated peptide
  misc_feature (3)..(3): Xaa can be Cys or D-Cys
  misc_feature (7)..(7): Xaa can be Cys or D-Cys
  misc_feature (15)..(15): Xaa can be Cys or D-Cys
AKXCELXCNPACTGXY

SEQ ID NO: 2799 - protein, 15 aa, Artificial Sequence
  Synthetically generated peptide
  misc_feature (3)..(3): Xaa can be Cys or D-Cys
  misc_feature (7)..(7): Xaa can be Cys or D-Cys
AKXCELXCTPACTGC

SEQ ID NO: 2800 - protein, 16 aa, Artificial Sequence
  Synthetically generated peptide
  misc_feature (3)..(3): Xaa can be Cys or D-Cys
  misc_feature (7)..(7): Xaa can be Cys or D-Cys
AKXCELXCTPACTGCK

SEQ ID NO: 2801 - protein, 16 aa, Artificial Sequence
  Synthetically generated peptide
  misc_feature (3)..(3): Xaa can be Cys or D-Cys
  misc_feature (7)..(7): Xaa can be Cys or D-Cys
AKXCELXCTPACTGCY

SEQ ID NO: 2802 - protein, 15 aa, Artificial Sequence
  Synthetically generated peptide
  misc_feature (3)..(3): Xaa can be Cys or D-Cys
  misc_feature (7)..(7): Xaa can be Cys or D-Cys
  misc_feature (15)..(15): Xaa can be Cys or D-Cys
AKXCELXCTPACTGX

SEQ ID NO: 2803 - protein, 16 aa, Artificial Sequence
  Synthetically generated peptide
  misc_feature (3)..(3): Xaa can be Cys or D-Cys
  misc_feature (7)..(7): Xaa can be Cys or D-Cys
  misc_feature (15)..(15): Xaa can be Cys or D-Cys
AKXCELXCTPACTGXK

SEQ ID NO: 2804 - protein, 16 aa, Artificial Sequence
  Synthetically generated peptide
  misc_feature (3)..(3): Xaa can be Cys or D-Cys
  misc_feature (7)..(7): Xaa can be Cys or D-Cys
  misc_feature (15)..(15): Xaa can be Cys or D-Cys
AKXCELXCTPACTGXY

SEQ ID NO: 2805 - protein, 15 aa, Artificial Sequence
  Synthetically generated peptide
  misc_feature (3)..(3): Xaa can be Cys or D-Cys
AKXCEYCCNPACTGC

SEQ ID NO: 2806 - protein, 16 aa, Artificial Sequence
  Synthetically generated peptide
  misc_feature (3)..(3): Xaa can be Cys or D-Cys
AKXCEYCCNPACTGCK

SEQ ID NO: 2807 - protein, 16 aa, Artificial Sequence
  Synthetically generated peptide
  misc_feature (3)..(3): Xaa can be Cys or D-Cys
AKXCEYCCNPACTGCY

SEQ ID NO: 2808 - protein, 15 aa, Artificial Sequence
  Synthetically generated peptide
  misc_feature (3)..(3): Xaa can be Cys or D-Cys
  misc_feature (15)..(15): Xaa can be Cys or D-Cys
AKXCEYCCNPACTGX

SEQ ID NO: 2809 - protein, 16 aa, Artificial Sequence
  Synthetically generated peptide
  misc_feature (3)..(3): Xaa can be Cys or D-Cys
  misc_feature (15)..(15): Xaa can be Cys or D-Cys
AKXCEYCCNPACTGXK

SEQ ID NO: 2810 - protein, 16 aa, Artificial Sequence
  Synthetically generated peptide
  misc_feature (3)..(3): Xaa can be Cys or D-Cys
  misc_feature (15)..(15): Xaa can be Cys or D-Cys
AKXCEYCCNPACTGXY

SEQ ID NO: 2811 - protein, 15 aa, Artificial Sequence
  Synthetically generated peptide
  misc_feature (3)..(3): Xaa can be Cys or D-Cys
AKXCEYCCTPACTGC

SEQ ID NO: 2812 - protein, 16 aa, Artificial Sequence
  Synthetically generated peptide
  misc_feature (3)..(3): Xaa can be Cys or D-Cys
AKXCEYCCTPACTGCK

SEQ ID NO: 2813 - protein, 16 aa, Artificial Sequence
  Synthetically generated peptide
  misc_feature (3)..(3): Xaa can be Cys or D-Cys
AKXCEYCCTPACTGCY

SEQ ID NO: 2814 - protein, 15 aa, Artificial Sequence
  Synthetically generated peptide
  misc_feature (3)..(3): Xaa can be Cys or D-Cys
  misc_feature (15)..(15): Xaa can be Cys or D-Cys
AKXCEYCCTPACTGX

SEQ ID NO: 2815 - protein, 16 aa, Artificial Sequence
  Synthetically generated peptide
  misc_feature (3)..(3): Xaa can be Cys or D-Cys
  misc_feature (15)..(15): Xaa can be Cys or D-Cys
AKXCEYCCTPACTGXK

SEQ ID NO: 2816 - protein, 16 aa, Artificial Sequence
  Synthetically generated peptide
  misc_feature (3)..(3): Xaa can be Cys or D-Cys
  misc_feature (15)..(15): Xaa can be Cys or D-Cys
AKXCEYCCTPACTGXY

SEQ ID NO: 2817 - protein, 15 aa, Artificial Sequence
  Synthetically generated peptide
  misc_feature (3)..(3): Xaa can be Cys or D-Cys
  misc_feature (7)..(7): Xaa can be Cys or D-Cys
AKXCEYXCNPACTGC

SEQ ID NO: 2818 - protein, 16 aa, Artificial Sequence
  Synthetically generated peptide
  misc_feature (3)..(3): Xaa can be Cys or D-Cys
  misc_feature (7)..(7): Xaa can be Cys or D-Cys
AKXCEYXCNPACTGCK

SEQ ID NO: 2819 - protein, 16 aa, Artificial Sequence
  Synthetically generated peptide
  misc_feature (3)..(3): Xaa can be Cys or D-Cys
  misc_feature (7)..(7): Xaa can be Cys or D-Cys
AKXCEYXCNPACTGCY

SEQ ID NO: 2820 - protein, 15 aa, Artificial Sequence
  Synthetically generated peptide
  misc_feature (3)..(3): Xaa can be Cys or D-Cys
  misc_feature (7)..(7): Xaa can be Cys or D-Cys
  misc_feature (15)..(15): Xaa can be Cys or D-Cys
AKXCEYXCNPACTGX

SEQ ID NO: 2821 - protein, 16 aa, Artificial Sequence
  Synthetically generated peptide
  misc_feature (3)..(3): Xaa can be Cys or D-Cys
  misc_feature (7)..(7): Xaa can be Cys or D-Cys
  misc_feature (15)..(15): Xaa can be Cys or D-Cys
AKXCEYXCNPACTGXK

SEQ ID NO: 2822 - protein, 16 aa, Artificial Sequence
  Synthetically generated peptide
  misc_feature (3)..(3): Xaa can be Cys or D-Cys
  misc_feature (7)..(7): Xaa can be Cys or D-Cys
  misc_feature (15)..(15): Xaa can be Cys or D-Cys
AKXCEYXCNPACTGXY

SEQ ID NO: 2823 - protein, 15 aa, Artificial Sequence
  Synthetically generated peptide
  misc_feature (3)..(3): Xaa can be Cys or D-Cys
  misc_feature (7)..(7): Xaa can be Cys or D-Cys
AKXCEYXCTPACTGC

SEQ ID NO: 2824 - protein, 16 aa, Artificial Sequence
  Synthetically generated peptide
  misc_feature (3)..(3): Xaa can be Cys or D-Cys
  misc_feature (7)..(7): Xaa can be Cys or D-Cys
AKXCEYXCTPACTGCK

SEQ ID NO: 2825 - protein, 16 aa, Artificial Sequence
  Synthetically generated peptide
  misc_feature (3)..(3): Xaa can be Cys or D-Cys
  misc_feature (7)..(7): Xaa can be Cys or D-Cys
AKXCEYXCTPACTGCY

SEQ ID NO: 2826 - protein, 15 aa, Artificial Sequence
  Synthetically generated peptide
  misc_feature (3)..(3): Xaa can be Cys or D-Cys
  misc_feature (7)..(7): Xaa can be Cys or D-Cys
  misc_feature (15)..(15): Xaa can be Cys or D-Cys
AKXCEYXCTPACTGX

SEQ ID NO: 2827 - protein, 16 aa, Artificial Sequence
  Synthetically generated peptide
  misc_feature (3)..(3): Xaa can be Cys or D-Cys
  misc_feature (7)..(7): Xaa can be Cys or D-Cys
  misc_feature (15)..(15): Xaa can be Cys or D-Cys
AKXCEYXCTPACTGXK

SEQ ID NO: 2828 - protein, 16 aa, Artificial Sequence
  Synthetically generated peptide
  misc_feature (3)..(3): Xaa can be Cys or D-Cys
  misc_feature (7)..(7): Xaa can be Cys or D-Cys
  misc_feature (15)..(15): Xaa can be Cys or D-Cys
AKXCEYXCTPACTGXY

SEQ ID NO: 2829 - protein, 15 aa, Artificial Sequence
  Synthetically generated peptide
  misc_feature (3)..(3): Xaa can be Cys or D-Cys
AKXCEFCCNPACTGC

SEQ ID NO: 2830 - protein, 16 aa, Artificial Sequence
  Synthetically generated peptide
  misc_feature (3)..(3): Xaa can be Cys or D-Cys
AKXCEFCCNPACTGCK

SEQ ID NO: 2831 - protein, 16 aa, Artificial Sequence
  Synthetically generated peptide
  misc_feature (3)..(3): Xaa can be Cys or D-Cys
AKXCEFCCNPACTGCY

SEQ ID NO: 2832 - protein, 15 aa, Artificial Sequence
  Synthetically generated peptide
  misc_feature (3)..(3): Xaa can be Cys or D-Cys
  misc_feature (15)..(15): Xaa can be Cys or D-Cys
AKXCEFCCNPACTGX

SEQ ID NO: 2833 - protein, 16 aa, Artificial Sequence
  Synthetically generated peptide
  misc_feature (3)..(3): Xaa can be Cys or D-Cys
  misc_feature (15)..(15): Xaa can be Cys or D-Cys
AKXCEFCCNPACTGXK

SEQ ID NO: 2834 - protein, 16 aa, Artificial Sequence
  Synthetically generated peptide
  misc_feature (3)..(3): Xaa can be Cys or D-Cys
  misc_feature (15)..(15): Xaa can be Cys or D-Cys
AKXCEFCCNPACTGXY

SEQ ID NO: 2835 - protein, 15 aa, Artificial Sequence
  Synthetically generated peptide
  misc_feature (3)..(3): Xaa can be Cys or D-Cys
AKXCEFCCTPACTGC

SEQ ID NO: 2836 - protein, 16 aa, Artificial Sequence
  Synthetically generated peptide
  misc_feature (3)..(3): Xaa can be Cys or D-Cys
AKXCEFCCTPACTGCK

SEQ ID NO: 2837 - protein, 16 aa, Artificial Sequence
  Synthetically generated peptide
  misc_feature (3)..(3): Xaa can be Cys or D-Cys
AKXCEFCCTPACTGCY

SEQ ID NO: 2838 - protein, 15 aa, Artificial Sequence
  Synthetically generated peptide
  misc_feature (3)..(3): Xaa can be Cys or D-Cys
  misc_feature (15)..(15): Xaa can be Cys or D-Cys
AKXCEFCCTPACTGX

SEQ ID NO: 2839 - protein, 16 aa, Artificial Sequence
  Synthetically generated peptide
  misc_feature (3)..(3): Xaa can be Cys or D-Cys
  misc_feature (15)..(15): Xaa can be Cys or D-Cys
AKXCEFCCTPACTGXK

SEQ ID NO: 2840 - protein, 16 aa, Artificial Sequence
  Synthetically generated peptide
  misc_feature (3)..(3): Xaa can be Cys or D-Cys
  misc_feature (15)..(15): Xaa can be Cys or D-Cys
AKXCEFCCTPACTGXY

SEQ ID NO: 2841 - protein, 15 aa, Artificial Sequence
  Synthetically generated peptide
  misc_feature (3)..(3): Xaa can be Cys or D-Cys
  misc_feature (7)..(7): Xaa can be Cys or D-Cys
AKXCEFXCNPACTGC

SEQ ID NO: 2842 - protein, 16 aa, Artificial Sequence
  Synthetically generated peptide
  misc_feature (3)..(3): Xaa can be Cys or D-Cys
  misc_feature (7)..(7): Xaa can be Cys or D-Cys
AKXCEFXCNPACTGCK

SEQ ID NO: 2843 - protein, 16 aa, Artificial Sequence
  Synthetically generated peptide
  misc_feature (3)..(3): Xaa can be Cys or D-Cys
  misc_feature (7)..(7): Xaa can be Cys or D-Cys
AKXCEFXCNPACTGCY

SEQ ID NO: 2844 - protein, 15 aa, Artificial Sequence
  Synthetically generated peptide
  misc_feature (3)..(3): Xaa can be Cys or D-Cys
  misc_feature (7)..(7): Xaa can be Cys or D-Cys
  misc_feature (15)..(15): Xaa can be Cys or D-Cys
AKXCEFXCNPACTGX

SEQ ID NO: 2845 - protein, 16 aa, Artificial Sequence
  Synthetically generated peptide
  misc_feature (3)..(3): Xaa can be Cys or D-Cys
  misc_feature (7)..(7): Xaa can be Cys or D-Cys
  misc_feature (15)..(15): Xaa can be Cys or D-Cys
AKXCEFXCNPACTGXK

SEQ ID NO: 2846 - protein, 16 aa, Artificial Sequence
  Synthetically generated peptide
  misc_feature (3)..(3): Xaa can be Cys or D-Cys
  misc_feature (7)..(7): Xaa can be Cys or D-Cys
  misc_feature (15)..(15): Xaa can be Cys or D-Cys
AKXCEFXCNPACTGXY

SEQ ID NO: 2847 - protein, 15 aa, Artificial Sequence
  Synthetically generated peptide
  misc_feature (3)..(3): Xaa can be Cys or D-Cys
  misc_feature (7)..(7): Xaa can be Cys or D-Cys
AKXCEFXCTPACTGC

SEQ ID NO: 2848 - protein, 16 aa, Artificial Sequence
  Synthetically generated peptide
  misc_feature (3)..(3): Xaa can be Cys or D-Cys
  misc_feature (7)..(7): Xaa can be Cys or D-Cys
AKXCEFXCTPACTGCK

SEQ ID NO: 2849 - protein, 16 aa, Artificial Sequence
  Synthetically generated peptide
  misc_feature (3)..(3): Xaa can be Cys or D-Cys
  misc_feature (7)..(7): Xaa can be Cys or D-Cys
AKXCEFXCTPACTGCY

SEQ ID NO: 2850 - protein, 15 aa, Artificial Sequence
  Synthetically generated peptide
  misc_feature (3)..(3): Xaa can be Cys or D-Cys
  misc_feature (7)..(7): Xaa can be Cys or D-Cys
  misc_feature (15)..(15): Xaa can be Cys or D-Cys
AKXCEFXCTPACTGX

SEQ ID NO: 2851 - protein, 16 aa, Artificial Sequence
  Synthetically generated peptide
  misc_feature (3)..(3): Xaa can be Cys or D-Cys
  misc_feature (7)..(7): Xaa can be Cys or D-Cys
  misc_feature (15)..(15): Xaa can be Cys or D-Cys
AKXCEFXCTPACTGXK

SEQ ID NO: 2852 - protein, 16 aa, Artificial Sequence
  Synthetically generated peptide
  misc_feature (3)..(3): Xaa can be Cys or D-Cys
  misc_feature (7)..(7): Xaa can be Cys or D-Cys
  misc_feature (15)..(15): Xaa can be Cys or D-Cys
AKXCEFXCTPACTGXY

SEQ ID NO: 2853 - protein, 15 aa, Artificial Sequence
  Synthetically generated peptide
  misc_feature (3)..(3): Xaa can be Cys or D-Cys
AKXCEWCCNPACTGC

SEQ ID NO: 2854 - protein, 16 aa, Artificial Sequence
  Synthetically generated peptide
  misc_feature (3)..(3): Xaa can be Cys or D-Cys
AKXCEWCCNPACTGCK

SEQ ID NO: 2855 - protein, 16 aa, Artificial Sequence
  Synthetically generated peptide
  misc_feature (3)..(3): Xaa can be Cys or D-Cys
AKXCEWCCNPACTGCY

SEQ ID NO: 2856 - protein, 15 aa, Artificial Sequence
  Synthetically generated peptide
  misc_feature (3)..(3): Xaa can be Cys or D-Cys
  misc_feature (15)..(15): Xaa can be Cys or D-Cys
AKXCEWCCNPACTGX

SEQ ID NO: 2857 - protein, 16 aa, Artificial Sequence
  Synthetically generated peptide
  misc_feature (3)..(3): Xaa can be Cys or D-Cys
  misc_feature (15)..(15): Xaa can be Cys or D-Cys
AKXCEWCCNPACTGXK

SEQ ID NO: 2858 - protein, 16 aa, Artificial Sequence
  Synthetically generated peptide
  misc_feature (3)..(3): Xaa can be Cys or D-Cys
  misc_feature (15)..(15): Xaa can be Cys or D-Cys
AKXCEWCCNPACTGXY

SEQ ID NO: 2859 - protein, 15 aa, Artificial Sequence
  Synthetically generated peptide
  misc_feature (3)..(3): Xaa can be Cys or D-Cys
AKXCEWCCTPACTGC

SEQ ID NO: 2860 - protein, 16 aa, Artificial Sequence
  Synthetically generated peptide
  misc_feature (3)..(3): Xaa can be Cys or D-Cys
AKXCEWCCTPACTGCK

SEQ ID NO: 2861 - protein, 16 aa, Artificial Sequence
  Synthetically generated peptide
  misc_feature (3)..(3): Xaa can be Cys or D-Cys
AKXCEWCCTPACTGCY

SEQ ID NO: 2862 - protein, 15 aa, Artificial Sequence
  Synthetically generated peptide
  misc_feature (3)..(3): Xaa can be Cys or D-Cys
  misc_feature (15)..(15): Xaa can be Cys or D-Cys
AKXCEWCCTPACTGX

SEQ ID NO: 2863 - protein, 16 aa, Artificial Sequence
  Synthetically generated peptide
  misc_feature (3)..(3): Xaa can be Cys or D-Cys
  misc_feature (15)..(15): Xaa can be Cys or D-Cys
AKXCEWCCTPACTGXK

SEQ ID NO: 2864 - protein, 16 aa, Artificial Sequence
  Synthetically generated peptide
  misc_feature (3)..(3): Xaa can be Cys or D-Cys
  misc_feature (15)..(15): Xaa can be Cys or D-Cys
AKXCEWCCTPACTGXY

SEQ ID NO: 2865 - protein, 15 aa, Artificial Sequence
  Synthetically generated peptide
  misc_feature (3)..(3): Xaa can be Cys or D-Cys
  misc_feature (7)..(7): Xaa can be Cys or D-Cys
AKXCEWXCNPACTGC

SEQ ID NO: 2866 - protein, 16 aa, Artificial Sequence
  Synthetically generated peptide
  misc_feature (3)..(3): Xaa can be Cys or D-Cys
  misc_feature (7)..(7): Xaa can be Cys or D-Cys
AKXCEWXCNPACTGCK

SEQ ID NO: 2867 - protein, 16 aa, Artificial Sequence
  Synthetically generated peptide
  misc_feature (3)..(3): Xaa can be Cys or D-Cys
  misc_feature (7)..(7): Xaa can be Cys or D-Cys
AKXCEWXCNPACTGCY

SEQ ID NO: 2868 - protein, 15 aa, Artificial Sequence
  Synthetically generated peptide
  misc_feature (3)..(3): Xaa can be Cys or D-Cys
  misc_feature (7)..(7): Xaa can be Cys or D-Cys
  misc_feature (15)..(15): Xaa can be Cys or D-Cys
AKXCEWXCNPACTGX

SEQ ID NO: 2869 - protein, 16 aa, Artificial Sequence
  Synthetically generated peptide
  misc_feature (3)..(3): Xaa can be Cys or D-Cys
  misc_feature (7)..(7): Xaa can be Cys or D-Cys
  misc_feature (15)..(15): Xaa can be Cys or D-Cys
AKXCEWXCNPACTGXK

SEQ ID NO: 2870 - protein, 16 aa, Artificial Sequence
  Synthetically generated peptide
  misc_feature (3)..(3): Xaa can be Cys or D-Cys
  misc_feature (7)..(7): Xaa can be Cys or D-Cys
  misc_feature (15)..(15): Xaa can be Cys or D-Cys
AKXCEWXCNPACTGXY

SEQ ID NO: 2871 - protein, 15 aa, Artificial Sequence
  Synthetically generated peptide
  misc_feature (3)..(3): Xaa can be Cys or D-Cys
  misc_feature (7)..(7): Xaa can be Cys or D-Cys
AKXCEWXCTPACTGC

SEQ ID NO: 2872 - protein, 16 aa, Artificial Sequence
  Synthetically generated peptide
  misc_feature (3)..(3): Xaa can be Cys or D-Cys
  misc_feature (7)..(7): Xaa can be Cys or D-Cys
AKXCEWXCTPACTGCK

SEQ ID NO: 2873 - protein, 16 aa, Artificial Sequence
  Synthetically generated peptide
  misc_feature (3)..(3): Xaa can be Cys or D-Cys
  misc_feature (7)..(7): Xaa can be Cys or D-Cys
AKXCEWXCTPACTGCY

SEQ ID NO: 2874 - protein, 15 aa, Artificial Sequence
  Synthetically generated peptide
  misc_feature (3)..(3): Xaa can be Cys or D-Cys
  misc_feature (7)..(7): Xaa can be Cys or D-Cys
  misc_feature (15)..(15): Xaa can be Cys or D-Cys
AKXCEWXCTPACTGX

SEQ ID NO: 2875 - protein, 16 aa, Artificial Sequence
  Synthetically generated peptide
  misc_feature (3)..(3): Xaa can be Cys or D-Cys
  misc_feature (7)..(7): Xaa can be Cys or D-Cys
  misc_feature (15)..(15): Xaa can be Cys or D-Cys
AKXCEWXCTPACTGXK

SEQ ID NO: 2876 - protein, 16 aa, Artificial Sequence
  Synthetically generated peptide
  misc_feature (3)..(3): Xaa can be Cys or D-Cys
  misc_feature (7)..(7): Xaa can be Cys or D-Cys
  misc_feature (15)..(15): Xaa can be Cys or D-Cys
AKXCEWXCTPACTGXY

SEQ ID NO: 2877 - protein, 15 aa, Artificial Sequence
  Synthetically generated peptide
ASCCEVCCNPACTGC

SEQ ID NO: 2878 - protein, 16 aa, Artificial Sequence
  Synthetically generated peptide
ASCCEVCCNPACTGCK

SEQ ID NO: 2879 - protein, 16 aa, Artificial Sequence
  Synthetically generated peptide
ASCCEVCCNPACTGCY

SEQ ID NO: 2880 - protein, 15 aa, Artificial Sequence
  Synthetically generated peptide
  misc_feature (15)..(15): Xaa can be Cys or D-Cys
ASCCEVCCNPACTGX

SEQ ID NO: 2881 - protein, 16 aa, Artificial Sequence
  Synthetically generated peptide
  misc_feature (15)..(15): Xaa can be Cys or D-Cys
ASCCEVCCNPACTGXK

SEQ ID NO: 2882 - protein, 16 aa, Artificial Sequence
  Synthetically generated peptide
  misc_feature (15)..(15): Xaa can be Cys or D-Cys
ASCCEVCCNPACTGXY

SEQ ID NO: 2883 - protein, 15 aa, Artificial Sequence
  Synthetically generated peptide
ASCCEVCCTPACTGC

SEQ ID NO: 2884 - protein, 16 aa, Artificial Sequence
  Synthetically generated peptide
ASCCEVCCTPACTGCK

SEQ ID NO: 2885 - protein, 16 aa, Artificial Sequence
  Synthetically generated peptide
ASCCEVCCTPACTGCY

SEQ ID NO: 2886 - protein, 15 aa, Artificial Sequence
  Synthetically generated peptide
  misc_feature (15)..(15): Xaa can be Cys or D-Cys
ASCCEVCCTPACTGX

SEQ ID NO: 2887 - protein, 16 aa, Artificial Sequence
  Synthetically generated peptide
  misc_feature (15)..(15): Xaa can be Cys or D-Cys
ASCCEVCCTPACTGXK

SEQ ID NO: 2888 - protein, 16 aa, Artificial Sequence
  Synthetically generated peptide
  misc_feature (15)..(15): Xaa can be Cys or D-Cys
ASCCEVCCTPACTGXY

SEQ ID NO: 2889 - protein, 15 aa, Artificial Sequence
  Synthetically generated peptide
  misc_feature (7)..(7): Xaa can be Cys or D-Cys
ASCCEVXCNPACTGC

SEQ ID NO: 2890 - protein, 16 aa, Artificial Sequence
  Synthetically generated peptide
  misc_feature (7)..(7): Xaa can be Cys or D-Cys
ASCCEVXCNPACTGCK

SEQ ID NO: 2891 - protein, 16 aa, Artificial Sequence
  Synthetically generated peptide
  misc_feature (7)..(7): Xaa can be Cys or D-Cys
ASCCEVXCNPACTGCY

SEQ ID NO: 2892 - protein, 15 aa, Artificial Sequence
  Synthetically generated peptide
  misc_feature (7)..(7): Xaa can be Cys or D-Cys
  misc_feature (15)..(15): Xaa can be Cys or D-Cys
ASCCEVXCNPACTGX

SEQ ID NO: 2893 - protein, 16 aa, Artificial Sequence
  Synthetically generated peptide
  misc_feature (7)..(7): Xaa can be Cys or D-Cys
  misc_feature (15)..(15): Xaa can be Cys or D-Cys
ASCCEVXCNPACTGXK

SEQ ID NO: 2894 - protein, 16 aa, Artificial Sequence
  Synthetically generated peptide
  misc_feature (7)..(7): Xaa can be Cys or D-Cys
  misc_feature (15)..(15): Xaa can be Cys or D-Cys
ASCCEVXCNPACTGXY

SEQ ID NO: 2895 - protein, 15 aa, Artificial Sequence
  Synthetically generated peptide
  misc_feature (7)..(7): Xaa can be Cys or D-Cys
ASCCEVXCTPACTGC

SEQ ID NO: 2896 - protein, 16 aa, Artificial Sequence
  Synthetically generated peptide
  misc_feature (7)..(7): Xaa can be Cys or D-Cys
ASCCEVXCTPACTGCK

SEQ ID NO: 2897 - protein, 16 aa, Artificial Sequence
  Synthetically generated peptide
  misc_feature (7)..(7): Xaa can be Cys or D-Cys
ASCCEVXCTPACTGCY

SEQ ID NO: 2898 - protein, 15 aa, Artificial Sequence
  Synthetically generated peptide
  misc_feature (7)..(7): Xaa can be Cys or D-Cys
  misc_feature (15)..(15): Xaa can be Cys or D-Cys
ASCCEVXCTPACTGX

SEQ ID NO: 2899 - protein, 16 aa, Artificial Sequence
  Synthetically generated peptide
  misc_feature (7)..(7): Xaa can be Cys or D-Cys
  misc_feature (15)..(15): Xaa can be Cys or D-Cys
ASCCEVXCTPACTGXK

SEQ ID NO: 2900 - protein, 16 aa, Artificial Sequence
  Synthetically generated peptide
  misc_feature (7)..(7): Xaa can be Cys or D-Cys
  misc_feature (15)..(15): Xaa can be Cys or D-Cys
ASCCEVXCTPACTGXY

SEQ ID NO: 2901 - protein, 15 aa, Artificial Sequence
  Synthetically generated peptide
ASCCEICCNPACTGC

SEQ ID NO: 2902 - protein, 16 aa, Artificial Sequence
  Synthetically generated peptide
ASCCEICCNPACTGCK

SEQ ID NO: 2903 - protein, 16 aa, Artificial Sequence
  Synthetically generated peptide
ASCCEICCNPACTGCY

SEQ ID NO: 2904 - protein, 15 aa, Artificial Sequence
  Synthetically generated peptide
  misc_feature (15)..(15): Xaa can be Cys or D-Cys
ASCCEICCNPACTGX

SEQ ID NO: 2905 - protein, 16 aa, Artificial Sequence
  Synthetically generated peptide
  misc_feature (15)..(15): Xaa can be Cys or D-Cys
ASCCEICCNPACTGXK

SEQ ID NO: 2906 - protein, 16 aa, Artificial Sequence
  Synthetically generated peptide
  misc_feature (15)..(15): Xaa can be Cys or D-Cys
ASCCEICCNPACTGXY

SEQ ID NO: 2907 - protein, 15 aa, Artificial Sequence
  Synthetically generated peptide
ASCCEICCTPACTGC

SEQ ID NO: 2908 - protein, 16 aa, Artificial Sequence
  Synthetically generated peptide
ASCCEICCTPACTGCK

SEQ ID NO: 2909 - protein, 16 aa, Artificial Sequence
  Synthetically generated peptide
ASCCEICCTPACTGCY

SEQ ID NO: 2910 - protein, 15 aa, Artificial Sequence
  Synthetically generated peptide
  misc_feature (15)..(15): Xaa can be Cys or D-Cys
ASCCEICCTPACTGX

SEQ ID NO: 2911 - protein, 16 aa, Artificial Sequence
  Synthetically generated peptide
  misc_feature (15)..(15): Xaa can be Cys or D-Cys
ASCCEICCTPACTGXK

SEQ ID NO: 2912 - protein, 16 aa, Artificial Sequence
  Synthetically generated peptide
  misc_feature (15)..(15): Xaa can be Cys or D-Cys
ASCCEICCTPACTGXY

SEQ ID NO: 2913 - protein, 15 aa, Artificial Sequence
  Synthetically generated peptide
  misc_feature (7)..(7): Xaa can be Cys or D-Cys
ASCCEIXCNPACTGC

SEQ ID NO: 2914 - protein, 16 aa, Artificial Sequence
  Synthetically generated peptide
  misc_feature (7)..(7): Xaa can be Cys or D-Cys
ASCCEIXCNPACTGCK

SEQ ID NO: 2915 - protein, 16 aa, Artificial Sequence
  Synthetically generated peptide
  misc_feature (7)..(7): Xaa can be Cys or D-Cys
ASCCEIXCNPACTGCY

SEQ ID NO: 2916 - protein, 15 aa, Artificial Sequence
  Synthetically generated peptide
  misc_feature (7)..(7): Xaa can be Cys or D-Cys
  misc_feature (15)..(15): Xaa can be Cys or D-Cys
ASCCEIXCNPACTGX

SEQ ID NO: 2917 - protein, 16 aa, Artificial Sequence
  Synthetically generated peptide
  misc_feature (7)..(7): Xaa can be Cys or D-Cys
  misc_feature (15)..(15): Xaa can be Cys or D-Cys
ASCCEIXCNPACTGXK

SEQ ID NO: 2918 - protein, 16 aa, Artificial Sequence
  Synthetically generated peptide
  misc_feature (7)..(7): Xaa can be Cys or D-Cys
  misc_feature (15)..(15): Xaa can be Cys or D-Cys
ASCCEIXCNPACTGXY

SEQ ID NO: 2919 - protein, 15 aa, Artificial Sequence
  Synthetically generated peptide
  misc_feature (7)..(7): Xaa can be Cys or D-Cys
ASCCEIXCTPACTGC

SEQ ID NO: 2920 - protein, 16 aa, Artificial Sequence
  Synthetically generated peptide
  misc_feature (7)..(7): Xaa can be Cys or D-Cys
ASCCEIXCTPACTGCK

SEQ ID NO: 2921 - protein, 16 aa, Artificial Sequence
  Synthetically generated peptide
  misc_feature (7)..(7): Xaa can be Cys or D-Cys
ASCCEIXCTPACTGCY

SEQ ID NO: 2922 - protein, 15 aa, Artificial Sequence
  Synthetically generated peptide
  misc_feature (7)..(7): Xaa can be Cys or D-Cys
  misc_feature (15)..(15): Xaa can be Cys or D-Cys
ASCCEIXCTPACTGX

SEQ ID NO: 2923 - protein, 16 aa, Artificial Sequence
  Synthetically generated peptide
  misc_feature (7)..(7): Xaa can be Cys or D-Cys
  misc_feature (15)..(15): Xaa can be Cys or D-Cys
ASCCEIXCTPACTGXK

SEQ ID NO: 2924 - protein, 16 aa, Artificial Sequence
  Synthetically generated peptide
  misc_feature (7)..(7): Xaa can be Cys or D-Cys
  misc_feature (15)..(15): Xaa can be Cys or D-Cys
ASCCEIXCTPACTGXY

SEQ ID NO: 2925 - protein, 15 aa, Artificial Sequence
  Synthetically generated peptide
ASCCELCCNPACTGC

SEQ ID NO: 2926 - protein, 16 aa, Artificial Sequence
  Synthetically generated peptide
ASCCELCCNPACTGCK

SEQ ID NO: 2927 - protein, 16 aa, Artificial Sequence
  Synthetically generated peptide
ASCCELCCNPACTGCY

SEQ ID NO: 2928 - protein, 15 aa, Artificial Sequence
  Synthetically generated peptide
  misc_feature (15)..(15): Xaa can be Cys or D-Cys
ASCCELCCNPACTGX

SEQ ID NO: 2929 - protein, 16 aa, Artificial Sequence
  Synthetically generated peptide
  misc_feature (15)..(15): Xaa can be Cys or D-Cys
ASCCELCCNPACTGXK

SEQ ID NO: 2930 - protein, 16 aa, Artificial Sequence
  Synthetically generated peptide
  misc_feature (15)..(15): Xaa can be Cys or D-Cys
ASCCELCCNPACTGXY

SEQ ID NO: 2931 - protein, 15 aa, Artificial Sequence
  Synthetically generated peptide
ASCCELCCTPACTGC

SEQ ID NO: 2932 - protein, 16 aa, Artificial Sequence
  Synthetically generated peptide
ASCCELCCTPACTGCK

SEQ ID NO: 2933 - protein, 16 aa, Artificial Sequence
  Synthetically generated peptide
ASCCELCCTPACTGCY

SEQ ID NO: 2934 - protein, 15 aa, Artificial Sequence
  Synthetically generated peptide
  misc_feature (15)..(15): Xaa can be Cys or D-Cys
ASCCELCCTPACTGX

SEQ ID NO: 2935 - protein, 16 aa, Artificial Sequence
  Synthetically generated peptide
  misc_feature (15)..(15): Xaa can be Cys or D-Cys
ASCCELCCTPACTGXK

SEQ ID NO: 2936 - protein, 16 aa, Artificial Sequence
  Synthetically generated peptide
  misc_feature (15)..(15): Xaa can be Cys or D-Cys
ASCCELCCTPACTGXY

SEQ ID NO: 2937 - protein, 15 aa, Artificial Sequence
  Synthetically generated peptide
  misc_feature (7)..(7): Xaa can be Cys or D-Cys
ASCCELXCNPACTGC

SEQ ID NO: 2938 - protein, 16 aa, Artificial Sequence
  Synthetically generated peptide
  misc_feature (7)..(7): Xaa can be Cys or D-Cys
ASCCELXCNPACTGCK

SEQ ID NO: 2939 - protein, 16 aa, Artificial Sequence
  Synthetically generated peptide
  misc_feature (7)..(7): Xaa can be Cys or D-Cys
ASCCELXCNPACTGCY

SEQ ID NO: 2940 - protein, 15 aa, Artificial Sequence
  Synthetically generated peptide
  misc_feature (7)..(7): Xaa can be Cys or D-Cys
  misc_feature (15)..(15): Xaa can be Cys or D-Cys
ASCCELXCNPACTGX

SEQ ID NO: 2941 - protein, 16 aa, Artificial Sequence
  Synthetically generated peptide
  misc_feature (7)..(7): Xaa can be Cys or D-Cys
  misc_feature (15)..(15): Xaa can be Cys or D-Cys
ASCCELXCNPACTGXK

SEQ ID NO: 2942 - protein, 16 aa, Artificial Sequence
  Synthetically generated peptide
  misc_feature (7)..(7): Xaa can be Cys or D-Cys
  misc_feature (15)..(15): Xaa can be Cys or D-Cys
ASCCELXCNPACTGXY

SEQ ID NO: 2943 - protein, 15 aa, Artificial Sequence
  Synthetically generated peptide
  misc_feature (7)..(7): Xaa can be Cys or D-Cys
ASCCELXCTPACTGC

SEQ ID NO: 2944 - protein, 16 aa, Artificial Sequence
  Synthetically generated peptide
  misc_feature (7)..(7): Xaa can be Cys or D-Cys
ASCCELXCTPACTGCK

SEQ ID NO: 2945 - protein, 16 aa, Artificial Sequence
  Synthetically generated peptide
  misc_feature (7)..(7): Xaa can be Cys or D-Cys
ASCCELXCTPACTGCY

SEQ ID NO: 2946 - protein, 15 aa, Artificial Sequence
  Synthetically generated peptide
  misc_feature (7)..(7): Xaa can be Cys or D-Cys
  misc_feature (15)..(15): Xaa can be Cys or D-Cys
ASCCELXCTPACTGX

SEQ ID NO: 2947 - protein, 16 aa, Artificial Sequence
  Synthetically generated peptide
  misc_feature (7)..(7): Xaa can be Cys or D-Cys
  misc_feature (15)..(15): Xaa can be Cys or D-Cys
ASCCELXCTPACTGXK

SEQ ID NO: 2948 - protein, 16 aa, Artificial Sequence
  Synthetically generated peptide
  misc_feature (7)..(7): Xaa can be Cys or D-Cys
  misc_feature (15)..(15): Xaa can be Cys or D-Cys
ASCCELXCTPACTGXY

SEQ ID NO: 2949 - protein, 15 aa, Artificial Sequence
  Synthetically generated peptide
ASCCEYCCNPACTGC

SEQ ID NO: 2950 - protein, 16 aa, Artificial Sequence
  Synthetically generated peptide
ASCCEYCCNPACTGCK

SEQ ID NO: 2951 - protein, 16 aa, Artificial Sequence
  Synthetically generated peptide
ASCCEYCCNPACTGCY

SEQ ID NO: 2952 - protein, 15 aa, Artificial Sequence
  Synthetically generated peptide
  misc_feature (15)..(15): Xaa can be Cys or D-Cys
ASCCEYCCNPACTGX

SEQ ID NO: 2953 - protein, 16 aa, Artificial Sequence
  Synthetically generated peptide
  misc_feature (15)..(15): Xaa can be Cys or D-Cys
ASCCEYCCNPACTGXK

SEQ ID NO: 2954 - protein, 16 aa, Artificial Sequence
  Synthetically generated peptide
  misc_feature (15)..(15): Xaa can be Cys or D-Cys
ASCCEYCCNPACTGXY

SEQ ID NO: 2955 - protein, 15 aa, Artificial Sequence
  Synthetically generated peptide
ASCCEYCCTPACTGC

SEQ ID NO: 2956 - protein, 16 aa, Artificial Sequence
  Synthetically generated peptide
ASCCEYCCTPACTGCK

SEQ ID NO: 2957 - protein, 16 aa, Artificial Sequence
  Synthetically generated peptide
ASCCEYCCTPACTGCY

SEQ ID NO: 2958 - protein, 15 aa, Artificial Sequence
  Synthetically generated peptide
  misc_feature (15)..(15): Xaa can be Cys or D-Cys
ASCCEYCCTPACTGX

SEQ ID NO: 2959 - protein, 16 aa, Artificial Sequence
  Synthetically generated peptide
  misc_feature (15)..(15): Xaa can be Cys or D-Cys
ASCCEYCCTPACTGXK

SEQ ID NO: 2960 - protein, 16 aa, Artificial Sequence
  Synthetically generated peptide
  misc_feature (15)..(15): Xaa can be Cys or D-Cys
ASCCEYCCTPACTGXY

SEQ ID NO: 2961 - protein, 15 aa, Artificial Sequence
  Synthetically generated peptide
  misc_feature (7)..(7): Xaa can be Cys or D-Cys
ASCCEYXCNPACTGC

SEQ ID NO: 2962 - protein, 16 aa, Artificial Sequence
  Synthetically generated peptide
  misc_feature (7)..(7): Xaa can be Cys or D-Cys
ASCCEYXCNPACTGCK

SEQ ID NO: 2963 - protein, 16 aa, Artificial Sequence
  Synthetically generated peptide
  misc_feature (7)..(7): Xaa can be Cys or D-Cys
ASCCEYXCNPACTGCY

SEQ ID NO: 2964 - protein, 15 aa, Artificial Sequence
  Synthetically generated peptide
  misc_feature (7)..(7): Xaa can be Cys or D-Cys
  misc_feature (15)..(15): Xaa can be Cys or D-Cys
ASCCEYXCNPACTGX

SEQ ID NO: 2965 - protein, 16 aa, Artificial Sequence
  Synthetically generated peptide
  misc_feature (7)..(7): Xaa can be Cys or D-Cys
  misc_feature (15)..(15): Xaa can be Cys or D-Cys
ASCCEYXCNPACTGXK

SEQ ID NO: 2966 - protein, 16 aa, Artificial Sequence
  Synthetically generated peptide
  misc_feature (7)..(7): Xaa can be Cys or D-Cys
  misc_feature (15)..(15): Xaa can be Cys or D-Cys
ASCCEYXCNPACTGXY

SEQ ID NO: 2967 - protein, 15 aa, Artificial Sequence
  Synthetically generated peptide
  misc_feature (7)..(7): Xaa can be Cys or D-Cys
ASCCEYXCTPACTGC

SEQ ID NO: 2968 - protein, 16 aa, Artificial Sequence
  Synthetically generated peptide
  misc_feature (7)..(7): Xaa can be Cys or D-Cys
ASCCEYXCTPACTGCK

SEQ ID NO: 2969 - protein, 16 aa, Artificial Sequence
  Synthetically generated peptide
  misc_feature (7)..(7): Xaa can be Cys or D-Cys
ASCCEYXCTPACTGCY

SEQ ID NO: 2970 - protein, 15 aa, Artificial Sequence
  Synthetically generated peptide
  misc_feature (7)..(7): Xaa can be Cys or D-Cys
  misc_feature (15)..(15): Xaa can be Cys or D-Cys
ASCCEYXCTPACTGX

SEQ ID NO: 2971 - protein, 16 aa, Artificial Sequence
  Synthetically generated peptide
  misc_feature (7)..(7): Xaa can be Cys or D-Cys
  misc_feature (15)..(15): Xaa can be Cys or D-Cys
ASCCEYXCTPACTGXK

SEQ ID NO: 2972 - protein, 16 aa, Artificial Sequence
  Synthetically generated peptide
  misc_feature (7)..(7): Xaa can be Cys or D-Cys
  misc_feature (15)..(15): Xaa can be Cys or D-Cys
ASCCEYXCTPACTGXY

SEQ ID NO: 2973 - protein, 15 aa, Artificial Sequence
  Synthetically generated peptide
ASCCEFCCNPACTGC

SEQ ID NO: 2974 - protein, 16 aa, Artificial Sequence
  Synthetically generated peptide
ASCCEFCCNPACTGCK

SEQ ID NO: 2975 - protein, 16 aa, Artificial Sequence
  Synthetically generated peptide
ASCCEFCCNPACTGCY

SEQ ID NO: 2976 - protein, 15 aa, Artificial Sequence
  Synthetically generated peptide
  misc_feature (15)..(15): Xaa can be Cys or D-Cys
ASCCEFCCNPACTGX

SEQ ID NO: 2977 - protein, 16 aa, Artificial Sequence
  Synthetically generated peptide
  misc_feature (15)..(15): Xaa can be Cys or D-Cys
ASCCEFCCNPACTGXK

SEQ ID NO: 2978 - protein, 16 aa, Artificial Sequence
  Synthetically generated peptide
  misc_feature (15)..(15): Xaa can be Cys or D-Cys
ASCCEFCCNPACTGXY

SEQ ID NO: 2979 - protein, 15 aa, Artificial Sequence
  Synthetically generated peptide
ASCCEFCCTPACTGC

SEQ ID NO: 2980 - protein, 16 aa, Artificial Sequence
  Synthetically generated peptide
ASCCEFCCTPACTGCK

SEQ ID NO: 2981 - protein, 16 aa, Artificial Sequence
  Synthetically generated peptide
ASCCEFCCTPACTGCY

SEQ ID NO: 2982 - protein, 15 aa, Artificial Sequence
  Synthetically generated peptide
  misc_feature (15)..(15): Xaa can be Cys or D-Cys
ASCCEFCCTPACTGX

SEQ ID NO: 2983 - protein, 16 aa, Artificial Sequence
  Synthetically generated peptide
  misc_feature (15)..(15): Xaa can be Cys or D-Cys
ASCCEFCCTPACTGXK

SEQ ID NO: 2984 - protein, 16 aa, Artificial Sequence
  Synthetically generated peptide
  misc_feature (15)..(15): Xaa can be Cys or D-Cys
ASCCEFCCTPACTGXY

SEQ ID NO: 2985 - protein, 15 aa, Artificial Sequence
  Synthetically generated peptide
  misc_feature (7)..(7): Xaa can be Cys or D-Cys
ASCCEFXCNPACTGC

SEQ ID NO: 2986 - protein, 16 aa, Artificial Sequence
  Synthetically generated peptide
  misc_feature (7)..(7): Xaa can be Cys or D-Cys
ASCCEFXCNPACTGCK

SEQ ID NO: 2987 - protein, 16 aa, Artificial Sequence
  Synthetically generated peptide
  misc_feature (7)..(7): Xaa can be Cys or D-Cys
ASCCEFXCNPACTGCY

SEQ ID NO: 2988 - protein, 15 aa, Artificial Sequence
  Synthetically generated peptide
  misc_feature (7)..(7): Xaa can be Cys or D-Cys
  misc_feature (15)..(15): Xaa can be Cys or D-Cys
ASCCEFXCNPACTGX

SEQ ID NO: 2989 - protein, 16 aa, Artificial Sequence
  Synthetically generated peptide
  misc_feature (7)..(7): Xaa can be Cys or D-Cys
  misc_feature (15)..(15): Xaa can be Cys or D-Cys
ASCCEFXCNPACTGXK

SEQ ID NO: 2990 - protein, 16 aa, Artificial Sequence
  Synthetically generated peptide
  misc_feature (7)..(7): Xaa can be Cys or D-Cys
  misc_feature (15)..(15): Xaa can be Cys or D-Cys
ASCCEFXCNPACTGXY

SEQ ID NO: 2991 - protein, 15 aa, Artificial Sequence
  Synthetically generated peptide
  misc_feature (7)..(7): Xaa can be Cys or D-Cys
ASCCEFXCTPACTGC

SEQ ID NO: 2992 - protein, 16 aa, Artificial Sequence
  Synthetically generated peptide
  misc_feature (7)..(7): Xaa can be Cys or D-Cys
ASCCEFXCTPACTGCK

SEQ ID NO: 2993 - protein, 16 aa, Artificial Sequence
  Synthetically generated peptide
  misc_feature (7)..(7): Xaa can be Cys or D-Cys
ASCCEFXCTPACTGCY

SEQ ID NO: 2994 - protein, 15 aa, Artificial Sequence
  Synthetically generated peptide
  misc_feature (7)..(7): Xaa can be Cys or D-Cys
  misc_feature (15)..(15): Xaa can be Cys or D-Cys
ASCCEFXCTPACTGX

SEQ ID NO: 2995 - protein, 16 aa, Artificial Sequence
  Synthetically generated peptide
  misc_feature (7)..(7): Xaa can be Cys or D-Cys
  misc_feature (15)..(15): Xaa can be Cys or D-Cys
ASCCEFXCTPACTGXK

SEQ ID NO: 2996 - protein, 16 aa, Artificial Sequence
  Synthetically generated peptide
  misc_feature (7)..(7): Xaa can be Cys or D-Cys
  misc_feature (15)..(15): Xaa can be Cys or D-Cys
ASCCEFXCTPACTGXY

SEQ ID NO: 2997 - protein, 15 aa, Artificial Sequence
  Synthetically generated peptide
ASCCEWCCNPACTGC

SEQ ID NO: 2998 - protein, 16 aa, Artificial Sequence
  Synthetically generated peptide
ASCCEWCCNPACTGCK

SEQ ID NO: 2999 - protein, 16 aa, Artificial Sequence
  Synthetically generated peptide
ASCCEWCCNPACTGCY

SEQ ID NO: 3000 - protein, 15 aa, Artificial Sequence
  Synthetically generated peptide
  misc_feature (15)..(15): Xaa can be Cys or D-Cys
ASCCEWCCNPACTGX

SEQ ID NO: 3001 - protein, 16 aa, Artificial Sequence
  Synthetically generated peptide
  misc_feature (15)..(15): Xaa can be Cys or D-Cys
ASCCEWCCNPACTGXK

SEQ ID NO: 3002 - protein, 16 aa, Artificial Sequence
  Synthetically generated peptide
  misc_feature (15)..(15): Xaa can be Cys or D-Cys
ASCCEWCCNPACTGXY

SEQ ID NO: 3003 - protein, 15 aa, Artificial Sequence
  Synthetically generated peptide
ASCCEWCCTPACTGC

SEQ ID NO: 3004 - protein, 16 aa, Artificial Sequence
  Synthetically generated peptide
ASCCEWCCTPACTGCK

SEQ ID NO: 3005 - protein, 16 aa, Artificial Sequence
  Synthetically generated peptide
ASCCEWCCTPACTGCY

SEQ ID NO: 3006 - protein, 15 aa, Artificial Sequence
  Synthetically generated peptide
  misc_feature (15)..(15): Xaa can be Cys or D-Cys
ASCCEWCCTPACTGX

SEQ ID NO: 3007 - protein, 16 aa, Artificial Sequence
  Synthetically generated peptide
  misc_feature (15)..(15): Xaa can be Cys or D-Cys
ASCCEWCCTPACTGXK

SEQ ID NO: 3008 - protein, 16 aa, Artificial Sequence
  Synthetically generated peptide
  misc_feature (15)..(15): Xaa can be Cys or D-Cys
ASCCEWCCTPACTGXY

SEQ ID NO: 3009 - protein, 15 aa, Artificial Sequence
  Synthetically generated peptide
  misc_feature (7)..(7): Xaa can be Cys or D-Cys
ASCCEWXCNPACTGC

SEQ ID NO: 3010 - protein, 16 aa, Artificial Sequence
  Synthetically generated peptide
  misc_feature (7)..(7): Xaa can be Cys or D-Cys
ASCCEWXCNPACTGCK

SEQ ID NO: 3011 - protein, 16 aa, Artificial Sequence
  Synthetically generated peptide
  misc_feature (7)..(7): Xaa can be Cys or D-Cys
ASCCEWXCNPACTGCY

SEQ ID NO: 3012 - protein, 15 aa, Artificial Sequence
  Synthetically generated peptide
  misc_feature (7)..(7): Xaa can be Cys or D-Cys
  misc_feature (15)..(15): Xaa can be Cys or D-Cys
ASCCEWXCNPACTGX

SEQ ID NO: 3013 - protein, 16 aa, Artificial Sequence
  Synthetically generated peptide
  misc_feature (7)..(7): Xaa can be Cys or D-Cys
  misc_feature (15)..(15): Xaa can be Cys or D-Cys
ASCCEWXCNPACTGXK

SEQ ID NO: 3014 - protein, 16 aa, Artificial Sequence
  Synthetically generated peptide
  misc_feature (7)..(7): Xaa can be Cys or D-Cys
  misc_feature (15)..(15): Xaa can be Cys or D-Cys
ASCCEWXCNPACTGXY

SEQ ID NO: 3015 - protein, 15 aa, Artificial Sequence
  Synthetically generated peptide
  misc_feature (7)..(7): Xaa can be Cys or D-Cys
ASCCEWXCTPACTGC

SEQ ID NO: 3016 - protein, 16 aa, Artificial Sequence
  Synthetically generated peptide
  misc_feature (7)..(7): Xaa can be Cys or D-Cys
ASCCEWXCTPACTGCK

SEQ ID NO: 3017 - protein, 16 aa, Artificial Sequence
  Synthetically generated peptide
  misc_feature (7)..(7): Xaa can be Cys or D-Cys
ASCCEWXCTPACTGCY

SEQ ID NO: 3018 - protein, 15 aa, Artificial Sequence
  Synthetically generated peptide
  misc_feature (7)..(7): Xaa can be Cys or D-Cys
  misc_feature (15)..(15): Xaa can be Cys or D-Cys
ASCCEWXCTPACTGX

SEQ ID NO: 3019 - protein, 16 aa, Artificial Sequence
  Synthetically generated peptide
  misc_feature (7)..(7): Xaa can be Cys or D-Cys
  misc_feature (15)..(15): Xaa can be Cys or D-Cys
ASCCEWXCTPACTGXK

SEQ ID NO: 3020 - protein, 16 aa, Artificial Sequence
  Synthetically generated peptide
  misc_feature (7)..(7): Xaa can be Cys or D-Cys
  misc_feature (15)..(15): Xaa can be Cys or D-Cys
ASCCEWXCTPACTGXY

SEQ ID NO: 3021 - protein, 15 aa, Artificial Sequence
  Synthetically generated peptide
  misc_feature (3)..(3): Xaa can be Cys or D-Cys
ASXCEVCCNPACTGC

SEQ ID NO: 3022 - protein, 16 aa, Artificial Sequence
  Synthetically generated peptide
  misc_feature (3)..(3): Xaa can be Cys or D-Cys
ASXCEVCCNPACTGCK

SEQ ID NO: 3023 - protein, 16 aa, Artificial Sequence
  Synthetically generated peptide
  misc_feature (3)..(3): Xaa can be Cys or D-Cys
ASXCEVCCNPACTGCY

SEQ ID NO: 3024 - protein, 15 aa, Artificial Sequence
  Synthetically generated peptide
  misc_feature (3)..(3): Xaa can be Cys or D-Cys
  misc_feature (15)..(15): Xaa can be Cys or D-Cys
ASXCEVCCNPACTGX

SEQ ID NO: 3025 - protein, 16 aa, Artificial Sequence
  Synthetically generated peptide
  misc_feature (3)..(3): Xaa can be Cys or D-Cys
  misc_feature (15)..(15): Xaa can be Cys or D-Cys
ASXCEVCCNPACTGXK

SEQ ID NO: 3026 - protein, 16 aa, Artificial Sequence
  Synthetically generated peptide
  misc_feature (3)..(3): Xaa can be Cys or D-Cys
  misc_feature (15)..(15): Xaa can be Cys or D-Cys
ASXCEVCCNPACTGXY

SEQ ID NO: 3027 - protein, 15 aa, Artificial Sequence
  Synthetically generated peptide
  misc_feature (3)..(3): Xaa can be Cys or D-Cys
ASXCEVCCTPACTGC

SEQ ID NO: 3028 - protein, 16 aa, Artificial Sequence
  Synthetically generated peptide
  misc_feature (3)..(3): Xaa can be Cys or D-Cys
ASXCEVCCTPACTGCK

SEQ ID NO: 3029 - protein, 16 aa, Artificial Sequence
  Synthetically generated peptide
  misc_feature (3)..(3): Xaa can be Cys or D-Cys
ASXCEVCCTPACTGCY

SEQ ID NO: 3030 - protein, 15 aa, Artificial Sequence
  Synthetically generated peptide
  misc_feature (3)..(3): Xaa can be Cys or D-Cys
  misc_feature (15)..(15): Xaa can be Cys or D-Cys
ASXCEVCCTPACTGX

SEQ ID NO: 3031 - protein, 16 aa, Artificial Sequence
  Synthetically generated peptide
  misc_feature (3)..(3): Xaa can be Cys or D-Cys
  misc_feature (15)..(15): Xaa can be Cys or D-Cys
ASXCEVCCTPACTGXK

SEQ ID NO: 3032 - protein, 16 aa, Artificial Sequence
  Synthetically generated peptide
  misc_feature (3)..(3): Xaa can be Cys or D-Cys
  misc_feature (15)..(15): Xaa can be Cys or D-Cys
ASXCEVCCTPACTGXY

SEQ ID NO: 3033 - protein, 15 aa, Artificial Sequence
  Synthetically generated peptide
  misc_feature (3)..(3): Xaa can be Cys or D-Cys
  misc_feature (7)..(7): Xaa can be Cys or D-Cys
ASXCEVXCNPACTGC

SEQ ID NO: 3034 - protein, 16 aa, Artificial Sequence
  Synthetically generated peptide
  misc_feature (3)..(3): Xaa can be Cys or D-Cys
  misc_feature (7)..(7): Xaa can be Cys or D-Cys
ASXCEVXCNPACTGCK

SEQ ID NO: 3035 - protein, 16 aa, Artificial Sequence
  Synthetically generated peptide
  misc_feature (3)..(3): Xaa can be Cys or D-Cys
  misc_feature (7)..(7): Xaa can be Cys or D-Cys
ASXCEVXCNPACTGCY

SEQ ID NO: 3036 - protein, 15 aa, Artificial Sequence
  Synthetically generated peptide
  misc_feature (3)..(3): Xaa can be Cys or D-Cys
  misc_feature (7)..(7): Xaa can be Cys or D-Cys
  misc_feature (15)..(15): Xaa can be Cys or D-Cys
ASXCEVXCNPACTGX

SEQ ID NO: 3037 - protein, 16 aa, Artificial Sequence
  Synthetically generated peptide
  misc_feature (3)..(3): Xaa can be Cys or D-Cys
  misc_feature (7)..(7): Xaa can be Cys or D-Cys
  misc_feature (15)..(15): Xaa can be Cys or D-Cys
ASXCEVXCNPACTGXK

SEQ ID NO: 3038 - protein, 16 aa, Artificial Sequence
  Synthetically generated peptide
  misc_feature (3)..(3): Xaa can be Cys or D-Cys
  misc_feature (7)..(7): Xaa can be Cys or D-Cys
  misc_feature (15)..(15): Xaa can be Cys or D-Cys
ASXCEVXCNPACTGXY

SEQ ID NO: 3039 - protein, 15 aa, Artificial Sequence
  Synthetically generated peptide
  misc_feature (3)..(3): Xaa can be Cys or D-Cys
  misc_feature (7)..(7): Xaa can be Cys or D-Cys
ASXCEVXCTPACTGC

SEQ ID NO: 3040 - protein, 16 aa, Artificial Sequence
  Synthetically generated peptide
  misc_feature (3)..(3): Xaa can be Cys or D-Cys
  misc_feature (7)..(7): Xaa can be Cys or D-Cys
ASXCEVXCTPACTGCK

SEQ ID NO: 3041 - protein, 16 aa, Artificial Sequence
  Synthetically generated peptide
  misc_feature (3)..(3): Xaa can be Cys or D-Cys
  misc_feature (7)..(7): Xaa can be Cys or D-Cys
ASXCEVXCTPACTGCY

SEQ ID NO: 3042 - protein, 15 aa, Artificial Sequence
  Synthetically generated peptide
  misc_feature (3)..(3): Xaa can be Cys or D-Cys
  misc_feature (7)..(7): Xaa can be Cys or D-Cys
  misc_feature (15)..(15): Xaa can be Cys or D-Cys
ASXCEVXCTPACTGX

SEQ ID NO: 3043 - protein, 16 aa, Artificial Sequence
  Synthetically generated peptide
  misc_feature (3)..(3): Xaa can be Cys or D-Cys
  misc_feature (7)..(7): Xaa can be Cys or D-Cys
  misc_feature (15)..(15): Xaa can be Cys or D-Cys
ASXCEVXCTPACTGXK

SEQ ID NO: 3044 - protein, 16 aa, Artificial Sequence
  Synthetically generated peptide
  misc_feature (3)..(3): Xaa can be Cys or D-Cys
  misc_feature (7)..(7): Xaa can be Cys or D-Cys
  misc_feature (15)..(15): Xaa can be Cys or D-Cys
ASXCEVXCTPACTGXY

SEQ ID NO: 3045 - protein, 15 aa, Artificial Sequence
  Synthetically generated peptide
  misc_feature (3)..(3): Xaa can be Cys or D-Cys
ASXCEICCNPACTGC

SEQ ID NO: 3046 - protein, 16 aa, Artificial Sequence
  Synthetically generated peptide
  misc_feature (3)..(3): Xaa can be Cys or D-Cys
ASXCEICCNPACTGCK

SEQ ID NO: 3047 - protein, 16 aa, Artificial Sequence
  Synthetically generated peptide
  misc_feature (3)..(3): Xaa can be Cys or D-Cys
ASXCEICCNPACTGCY

SEQ ID NO: 3048 - protein, 15 aa, Artificial Sequence
  Synthetically generated peptide
  misc_feature (3)..(3): Xaa can be Cys or D-Cys
  misc_feature (15)..(15): Xaa can be Cys or D-Cys
ASXCEICCNPACTGX

SEQ ID NO: 3049 - protein, 16 aa, Artificial Sequence
  Synthetically generated peptide
  misc_feature (3)..(3): Xaa can be Cys or D-Cys
  misc_feature (15)..(15): Xaa can be Cys or D-Cys
ASXCEICCNPACTGXK

SEQ ID NO: 3050 - protein, 16 aa, Artificial Sequence
  Synthetically generated peptide
  misc_feature (3)..(3): Xaa can be Cys or D-Cys
  misc_feature (15)..(15): Xaa can be Cys or D-Cys
ASXCEICCNPACTGXY

SEQ ID NO: 3051 - protein, 15 aa, Artificial Sequence
  Synthetically generated peptide
  misc_feature (3)..(3): Xaa can be Cys or D-Cys
ASXCEICCTPACTGC

SEQ ID NO: 3052 - protein, 16 aa, Artificial Sequence
  Synthetically generated peptide
  misc_feature (3)..(3): Xaa can be Cys or D-Cys
ASXCEICCTPACTGCK

SEQ ID NO: 3053 - protein, 16 aa, Artificial Sequence
  Synthetically generated peptide
  misc_feature (3)..(3): Xaa can be Cys or D-Cys
ASXCEICCTPACTGCY

SEQ ID NO: 3054 - protein, 15 aa, Artificial Sequence
  Synthetically generated peptide
  misc_feature (3)..(3): Xaa can be Cys or D-Cys
  misc_feature (15)..(15): Xaa can be Cys or D-Cys
ASXCEICCTPACTGX

SEQ ID NO: 3055 - protein, 16 aa, Artificial Sequence
  Synthetically generated peptide
  misc_feature (3)..(3): Xaa can be Cys or D-Cys
  misc_feature (15)..(15): Xaa can be Cys or D-Cys
ASXCEICCTPACTGXK

SEQ ID NO: 3056 - protein, 16 aa, Artificial Sequence
  Synthetically generated peptide
  misc_feature (3)..(3): Xaa can be Cys or D-Cys
  misc_feature (15)..(15): Xaa can be Cys or D-Cys
ASXCEICCTPACTGXY

SEQ ID NO: 3057 - protein, 15 aa, Artificial Sequence
  Synthetically generated peptide
  misc_feature (3)..(3): Xaa can be Cys or D-Cys
  misc_feature (7)..(7): Xaa can be Cys or D-Cys
ASXCEIXCNPACTGC

SEQ ID NO: 3058 - protein, 16 aa, Artificial Sequence
  Synthetically generated peptide
  misc_feature (3)..(3): Xaa can be Cys or D-Cys
  misc_feature (7)..(7): Xaa can be Cys or D-Cys
ASXCEIXCNPACTGCK

SEQ ID NO: 3059 - protein, 16 aa, Artificial Sequence
  Synthetically generated peptide
  misc_feature (3)..(3): Xaa can be Cys or D-Cys
  misc_feature (7)..(7): Xaa can be Cys or D-Cys
ASXCEIXCNPACTGCY

SEQ ID NO: 3060 - protein, 15 aa, Artificial Sequence
  Synthetically generated peptide
  misc_feature (3)..(3): Xaa can be Cys or D-Cys
  misc_feature (7)..(7): Xaa can be Cys or D-Cys
  misc_feature (15)..(15): Xaa can be Cys or D-Cys
ASXCEIXCNPACTGX

SEQ ID NO: 3061 - protein, 16 aa, Artificial Sequence
  Synthetically generated peptide
  misc_feature (3)..(3): Xaa can be Cys or D-Cys
  misc_feature (7)..(7): Xaa can be Cys or D-Cys
  misc_feature (15)..(15): Xaa can be Cys or D-Cys
ASXCEIXCNPACTGXK

SEQ ID NO: 3062 - protein, 16 aa, Artificial Sequence
  Synthetically generated peptide
  misc_feature (3)..(3): Xaa can be Cys or D-Cys
  misc_feature (7)..(7): Xaa can be Cys or D-Cys
  misc_feature (15)..(15): Xaa can be Cys or D-Cys
ASXCEIXCNPACTGXY

SEQ ID NO: 3063 - protein, 15 aa, Artificial Sequence
  Synthetically generated peptide
  misc_feature (3)..(3): Xaa can be Cys or D-Cys
  misc_feature (7)..(7): Xaa can be Cys or D-Cys
ASXCEIXCTPACTGC

SEQ ID NO: 3064 - protein, 16 aa, Artificial Sequence
  Synthetically generated peptide
  misc_feature (3)..(3): Xaa can be Cys or D-Cys
  misc_feature (7)..(7): Xaa can be Cys or D-Cys
ASXCEIXCTPACTGCK

SEQ ID NO: 3065 - protein, 16 aa, Artificial Sequence
  Synthetically generated peptide
  misc_feature (3)..(3): Xaa can be Cys or D-Cys
  misc_feature (7)..(7): Xaa can be Cys or D-Cys
ASXCEIXCTPACTGCY

SEQ ID NO: 3066 - protein, 15 aa, Artificial Sequence
  Synthetically generated peptide
  misc_feature (3)..(3): Xaa can be Cys or D-Cys
  misc_feature (7)..(7): Xaa can be Cys or D-Cys
  misc_feature (15)..(15): Xaa can be Cys or D-Cys
ASXCEIXCTPACTGX

SEQ ID NO: 3067 - protein, 16 aa, Artificial Sequence
  Synthetically generated peptide
  misc_feature (3)..(3): Xaa can be Cys or D-Cys
  misc_feature (7)..(7): Xaa can be Cys or D-Cys
  misc_feature (15)..(15): Xaa can be Cys or D-Cys
ASXCEIXCTPACTGXK

SEQ ID NO: 3068 - protein, 16 aa, Artificial Sequence
  Synthetically generated peptide
  misc_feature (3)..(3): Xaa can be Cys or D-Cys
  misc_feature (7)..(7): Xaa can be Cys or D-Cys
  misc_feature (15)..(15): Xaa can be Cys or D-Cys
ASXCEIXCTPACTGXY

SEQ ID NO: 3069 - protein, 15 aa, Artificial Sequence
  Synthetically generated peptide
  misc_feature (3)..(3): Xaa can be Cys or D-Cys
ASXCELCCNPACTGC

SEQ ID NO: 3070 - protein, 16 aa, Artificial Sequence
  Synthetically generated peptide
  misc_feature (3)..(3): Xaa can be Cys or D-Cys
ASXCELCCNPACTGCK

SEQ ID NO: 3071 - protein, 16 aa, Artificial Sequence
  Synthetically generated peptide
  misc_feature (3)..(3): Xaa can be Cys or D-Cys
ASXCELCCNPACTGCY

SEQ ID NO: 3072 - protein, 15 aa, Artificial Sequence
  Synthetically generated peptide
  misc_feature (3)..(3): Xaa can be Cys or D-Cys
  misc_feature (15)..(15): Xaa can be Cys or D-Cys
ASXCELCCNPACTGX

SEQ ID NO: 3073 - protein, 16 aa, Artificial Sequence
  Synthetically generated peptide
  misc_feature (3)..(3): Xaa can be Cys or D-Cys
  misc_feature (15)..(15): Xaa can be Cys or D-Cys
ASXCELCCNPACTGXK

SEQ ID NO: 3074 - protein, 16 aa, Artificial Sequence
  Synthetically generated peptide
  misc_feature (3)..(3): Xaa can be Cys or D-Cys
  misc_feature (15)..(15): Xaa can be Cys or D-Cys
ASXCELCCNPACTGXY

SEQ ID NO: 3075 - protein, 15 aa, Artificial Sequence
  Synthetically generated peptide
  misc_feature (3)..(3): Xaa can be Cys or D-Cys
ASXCELCCTPACTGC

SEQ ID NO: 3076 - protein, 16 aa, Artificial Sequence
  Synthetically generated peptide
  misc_feature (3)..(3): Xaa can be Cys or D-Cys
ASXCELCCTPACTGCK

SEQ ID NO: 3077 - protein, 16 aa, Artificial Sequence
  Synthetically generated peptide
  misc_feature (3)..(3): Xaa can be Cys or D-Cys
ASXCELCCTPACTGCY

SEQ ID NO: 3078 - protein, 15 aa, Artificial Sequence
  Synthetically generated peptide
  misc_feature (3)..(3): Xaa can be Cys or D-Cys
  misc_feature (15)..(15): Xaa can be Cys or D-Cys
ASXCELCCTPACTGX

SEQ ID NO: 3079 - protein, 16 aa, Artificial Sequence
  Synthetically generated peptide
  misc_feature (3)..(3): Xaa can be Cys or D-Cys
  misc_feature (15)..(15): Xaa can be Cys or D-Cys
ASXCELCCTPACTGXK

SEQ ID NO: 3080 - protein, 16 aa, Artificial Sequence
  Synthetically generated peptide
  misc_feature (3)..(3): Xaa can be Cys or D-Cys
  misc_feature (15)..(15): Xaa can be Cys or D-Cys
ASXCELCCTPACTGXY

SEQ ID NO: 3081 - protein, 15 aa, Artificial Sequence
  Synthetically generated peptide
  misc_feature (3)..(3): Xaa can be Cys or D-Cys
  misc_feature (7)..(7): Xaa can be Cys or D-Cys
ASXCELXCNPACTGC

SEQ ID NO: 3082 - protein, 16 aa, Artificial Sequence
  Synthetically generated peptide
  misc_feature (3)..(3): Xaa can be Cys or D-Cys
  misc_feature (7)..(7): Xaa can be Cys or D-Cys
ASXCELXCNPACTGCK

SEQ ID NO: 3083 - protein, 16 aa, Artificial Sequence
  Synthetically generated peptide
  misc_feature (3)..(3): Xaa can be Cys or D-Cys
  misc_feature (7)..(7): Xaa can be Cys or D-Cys
ASXCELXCNPACTGCY

SEQ ID NO: 3084 - protein, 15 aa, Artificial Sequence
  Synthetically generated peptide
  misc_feature (3)..(3): Xaa can be Cys or D-Cys
  misc_feature (7)..(7): Xaa can be Cys or D-Cys
  misc_feature (15)..(15): Xaa can be Cys or D-Cys
ASXCELXCNPACTGX

SEQ ID NO: 3085 - protein, 16 aa, Artificial Sequence
  Synthetically generated peptide
  misc_feature (3)..(3): Xaa can be Cys or D-Cys
  misc_feature (7)..(7): Xaa can be Cys or D-Cys
  misc_feature (15)..(15): Xaa can be Cys or D-Cys
ASXCELXCNPACTGXK

SEQ ID NO: 3086 - protein, 16 aa, Artificial Sequence
  Synthetically generated peptide
  misc_feature (3)..(3): Xaa can be Cys or D-Cys
  misc_feature (7)..(7): Xaa can be Cys or D-Cys
  misc_feature (15)..(15): Xaa can be Cys or D-Cys
ASXCELXCNPACTGXY

SEQ ID NO: 3087 - protein, 15 aa, Artificial Sequence
  Synthetically generated peptide
  misc_feature (3)..(3): Xaa can be Cys or D-Cys
  misc_feature (7)..(7): Xaa can be Cys or D-Cys
ASXCELXCTPACTGC

SEQ ID NO: 3088 - protein, 16 aa, Artificial Sequence
  Synthetically generated peptide
  misc_feature (3)..(3): Xaa can be Cys or D-Cys
  misc_feature (7)..(7): Xaa can be Cys or D-Cys
ASXCELXCTPACTGCK

SEQ ID NO: 3089 - protein, 16 aa, Artificial Sequence
  Synthetically generated peptide
  misc_feature (3)..(3): Xaa can be Cys or D-Cys
  misc_feature (7)..(7): Xaa can be Cys or D-Cys
ASXCELXCTPACTGCY

SEQ ID NO: 3090 - protein, 15 aa, Artificial Sequence
  Synthetically generated peptide
  misc_feature (3)..(3): Xaa can be Cys or D-Cys
  misc_feature (7)..(7): Xaa can be Cys or D-Cys
  misc_feature (15)..(15): Xaa can be Cys or D-Cys
ASXCELXCTPACTGX

SEQ ID NO: 3091 - protein, 16 aa, Artificial Sequence
  Synthetically generated peptide
  misc_feature (3)..(3): Xaa can be Cys or D-Cys
  misc_feature (7)..(7): Xaa can be Cys or D-Cys
  misc_feature (15)..(15): Xaa can be Cys or D-Cys
ASXCELXCTPACTGXK

SEQ ID NO: 3092 - protein, 16 aa, Artificial Sequence
  Synthetically generated peptide
  misc_feature (3)..(3): Xaa can be Cys or D-Cys
  misc_feature (7)..(7): Xaa can be Cys or D-Cys
  misc_feature (15)..(15): Xaa can be Cys or D-Cys
ASXCELXCTPACTGXY

SEQ ID NO: 3093 - protein, 15 aa, Artificial Sequence
  Synthetically generated peptide
  misc_feature (3)..(3): Xaa can be Cys or D-Cys
ASXCEYCCNPACTGC

SEQ ID NO: 3094 - protein, 16 aa, Artificial Sequence
  Synthetically generated peptide
  misc_feature (3)..(3): Xaa can be Cys or D-Cys
ASXCEYCCNPACTGCK

SEQ ID NO: 3095 - protein, 16 aa, Artificial Sequence
  Synthetically generated peptide
  misc_feature (3)..(3): Xaa can be Cys or D-Cys
ASXCEYCCNPACTGCY

SEQ ID NO: 3096 - protein, 15 aa, Artificial Sequence
  Synthetically generated peptide
  misc_feature (3)..(3): Xaa can be Cys or D-Cys
  misc_feature (15)..(15): Xaa can be Cys or D-Cys
ASXCEYCCNPACTGX

SEQ ID NO: 3097 - protein, 16 aa, Artificial Sequence
  Synthetically generated peptide
  misc_feature (3)..(3): Xaa can be Cys or D-Cys
  misc_feature (15)..(15): Xaa can be Cys or D-Cys
ASXCEYCCNPACTGXK

SEQ ID NO: 3098 - protein, 16 aa, Artificial Sequence
  Synthetically generated peptide
  misc_feature (3)..(3): Xaa can be Cys or D-Cys
  misc_feature (15)..(15): Xaa can be Cys or D-Cys
ASXCEYCCNPACTGXY

SEQ ID NO: 3099 - protein, 15 aa, Artificial Sequence
  Synthetically generated peptide
  misc_feature (3)..(3): Xaa can be Cys or D-Cys
ASXCEYCCTPACTGC

SEQ ID NO: 3100 - protein, 16 aa, Artificial Sequence
  Synthetically generated peptide
  misc_feature (3)..(3): Xaa can be Cys or D-Cys
ASXCEYCCTPACTGCK

SEQ ID NO: 3101 - protein, 16 aa, Artificial Sequence
  Synthetically generated peptide
  misc_feature (3)..(3): Xaa can be Cys or D-Cys
ASXCEYCCTPACTGCY

SEQ ID NO: 3102 - protein, 15 aa, Artificial Sequence
  Synthetically generated peptide
  misc_feature (3)..(3): Xaa can be Cys or D-Cys
  misc_feature (15)..(15): Xaa can be Cys or D-Cys
ASXCEYCCTPACTGX

SEQ ID NO: 3103 - protein, 16 aa, Artificial Sequence
  Synthetically generated peptide
  misc_feature (3)..(3): Xaa can be Cys or D-Cys
  misc_feature (15)..(15): Xaa can be Cys or D-Cys
ASXCEYCCTPACTGXK

SEQ ID NO: 3104 - protein, 16 aa, Artificial Sequence
  Synthetically generated peptide
  misc_feature (3)..(3): Xaa can be Cys or D-Cys
  misc_feature (15)..(15): Xaa can be Cys or D-Cys
ASXCEYCCTPACTGXY

SEQ ID NO: 3105 - protein, 15 aa, Artificial Sequence
  Synthetically generated peptide
  misc_feature (3)..(3): Xaa can be Cys or D-Cys
  misc_feature (7)..(7): Xaa can be Cys or D-Cys
ASXCEYXCNPACTGC

SEQ ID NO: 3106 - protein, 16 aa, Artificial Sequence
  Synthetically generated peptide
  misc_feature (3)..(3): Xaa can be Cys or D-Cys
  misc_feature (7)..(7): Xaa can be Cys or D-Cys
ASXCEYXCNPACTGCK

SEQ ID NO: 3107 - protein, 16 aa, Artificial Sequence
  Synthetically generated peptide
  misc_feature (3)..(3): Xaa can be Cys or D-Cys
  misc_feature (7)..(7): Xaa can be Cys or D-Cys
ASXCEYXCNPACTGCY

SEQ ID NO: 3108 - protein, 15 aa, Artificial Sequence
  Synthetically generated peptide
  misc_feature (3)..(3): Xaa can be Cys or D-Cys
  misc_feature (7)..(7): Xaa can be Cys or D-Cys
  misc_feature (15)..(15): Xaa can be Cys or D-Cys
ASXCEYXCNPACTGX

SEQ ID NO: 3109 - protein, 16 aa, Artificial Sequence
  Synthetically generated peptide
  misc_feature (3)..(3): Xaa can be Cys or D-Cys
  misc_feature (7)..(7): Xaa can be Cys or D-Cys
  misc_feature (15)..(15): Xaa can be Cys or D-Cys
ASXCEYXCNPACTGXK

SEQ ID NO: 3110 - protein, 16 aa, Artificial Sequence
  Synthetically generated peptide
  misc_feature (3)..(3): Xaa can be Cys or D-Cys
  misc_feature (7)..(7): Xaa can be Cys or D-Cys
  misc_feature (15)..(15): Xaa can be Cys or D-Cys
ASXCEYXCNPACTGXY

SEQ ID NO: 3111 - protein, 15 aa, Artificial Sequence
  Synthetically generated peptide
  misc_feature (3)..(3): Xaa can be Cys or D-Cys
  misc_feature (7)..(7): Xaa can be Cys or D-Cys
ASXCEYXCTPACTGC

SEQ ID NO: 3112 - protein, 16 aa, Artificial Sequence
  Synthetically generated peptide
  misc_feature (3)..(3): Xaa can be Cys or D-Cys
  misc_feature (7)..(7): Xaa can be Cys or D-Cys
ASXCEYXCTPACTGCK

SEQ ID NO: 3113 - protein, 16 aa, Artificial Sequence
  Synthetically generated peptide
  misc_feature (3)..(3): Xaa can be Cys or D-Cys
  misc_feature (7)..(7): Xaa can be Cys or D-Cys
ASXCEYXCTPACTGCY

SEQ ID NO: 3114 - protein, 15 aa, Artificial Sequence
  Synthetically generated peptide
  misc_feature (3)..(3): Xaa can be Cys or D-Cys
  misc_feature (7)..(7): Xaa can be Cys or D-Cys
  misc_feature (15)..(15): Xaa can be Cys or D-Cys
ASXCEYXCTPACTGX

SEQ ID NO: 3115 - protein, 16 aa, Artificial Sequence
  Synthetically generated peptide
  misc_feature (3)..(3): Xaa can be Cys or D-Cys
  misc_feature (7)..(7): Xaa can be Cys or D-Cys
  misc_feature (15)..(15): Xaa can be Cys or D-Cys
ASXCEYXCTPACTGXK

SEQ ID NO: 3116 - protein, 16 aa, Artificial Sequence
  Synthetically generated peptide
  misc_feature (3)..(3): Xaa can be Cys or D-Cys
  misc_feature (7)..(7): Xaa can be Cys or D-Cys
  misc_feature (15)..(15): Xaa can be Cys or D-Cys
ASXCEYXCTPACTGXY

SEQ ID NO: 3117 - protein, 15 aa, Artificial Sequence
  Synthetically generated peptide
  misc_feature (3)..(3): Xaa can be Cys or D-Cys
ASXCEFCCNPACTGC

SEQ ID NO: 3118 - protein, 16 aa, Artificial Sequence
  Synthetically generated peptide
  misc_feature (3)..(3): Xaa can be Cys or D-Cys
ASXCEFCCNPACTGCK

SEQ ID NO: 3119 - protein, 16 aa, Artificial Sequence
  Synthetically generated peptide
  misc_feature (3)..(3): Xaa can be Cys or D-Cys
ASXCEFCCNPACTGCY

SEQ ID NO: 3120 - protein, 15 aa, Artificial Sequence
  Synthetically generated peptide
  misc_feature (3)..(3): Xaa can be Cys or D-Cys
  misc_feature (15)..(15): Xaa can be Cys or D-Cys
ASXCEFCCNPACTGX

SEQ ID NO: 3121 - protein, 16 aa, Artificial Sequence
  Synthetically generated peptide
  misc_feature (3)..(3): Xaa can be Cys or D-Cys
  misc_feature (15)..(15): Xaa can be Cys or D-Cys
ASXCEFCCNPACTGXK

SEQ ID NO: 3122 - protein, 16 aa, Artificial Sequence
  Synthetically generated peptide
  misc_feature (3)..(3): Xaa can be Cys or D-Cys
  misc_feature (15)..(15): Xaa can be Cys or D-Cys
ASXCEFCCNPACTGXY

SEQ ID NO: 3123 - protein, 15 aa, Artificial Sequence
  Synthetically generated peptide
  misc_feature (3)..(3): Xaa can be Cys or D-Cys
ASXCEFCCTPACTGC

SEQ ID NO: 3124 - protein, 16 aa, Artificial Sequence
  Synthetically generated peptide
  misc_feature (3)..(3): Xaa can be Cys or D-Cys
ASXCEFCCTPACTGCK

SEQ ID NO: 3125 - protein, 16 aa, Artificial Sequence
  Synthetically generated peptide
  misc_feature (3)..(3): Xaa can be Cys or D-Cys
ASXCEFCCTPACTGCY

SEQ ID NO: 3126 - protein, 15 aa, Artificial Sequence
  Synthetically generated peptide
  misc_feature (3)..(3): Xaa can be Cys or D-Cys
  misc_feature (15)..(15): Xaa can be Cys or D-Cys
ASXCEFCCTPACTGX

SEQ ID NO: 3127 - protein, 16 aa, Artificial Sequence
  Synthetically generated peptide
  misc_feature (3)..(3): Xaa can be Cys or D-Cys
  misc_feature (15)..(15): Xaa can be Cys or D-Cys
ASXCEFCCTPACTGXK

SEQ ID NO: 3128 - protein, 16 aa, Artificial Sequence
  Synthetically generated peptide
  misc_feature (3)..(3): Xaa can be Cys or D-Cys
  misc_feature (15)..(15): Xaa can be Cys or D-Cys
ASXCEFCCTPACTGXY

SEQ ID NO: 3129 - protein, 15 aa, Artificial Sequence
  Synthetically generated peptide
  misc_feature (3)..(3): Xaa can be Cys or D-Cys
  misc_feature (7)..(7): Xaa can be Cys or D-Cys
ASXCEFXCNPACTGC

SEQ ID NO: 3130 - protein, 16 aa, Artificial Sequence
  Synthetically generated peptide
  misc_feature (3)..(3): Xaa can be Cys or D-Cys
  misc_feature (7)..(7): Xaa can be Cys or D-Cys
ASXCEFXCNPACTGCK

SEQ ID NO: 3131 - protein, 16 aa, Artificial Sequence
  Synthetically generated peptide
  misc_feature (3)..(3): Xaa can be Cys or D-Cys
  misc_feature (7)..(7): Xaa can be Cys or D-Cys
ASXCEFXCNPACTGCY

SEQ ID NO: 3132 - protein, 15 aa, Artificial Sequence
  Synthetically generated peptide
  misc_feature (3)..(3): Xaa can be Cys or D-Cys
  misc_feature (7)..(7): Xaa can be Cys or D-Cys
  misc_feature (15)..(15): Xaa can be Cys or D-Cys
ASXCEFXCNPACTGX

SEQ ID NO: 3133 - protein, 16 aa, Artificial Sequence
  Synthetically generated peptide
  misc_feature (3)..(3): Xaa can be Cys or D-Cys
  misc_feature (7)..(7): Xaa can be Cys or D-Cys
  misc_feature (15)..(15): Xaa can be Cys or D-Cys
ASXCEFXCNPACTGXK

SEQ ID NO: 3134 - protein, 16 aa, Artificial Sequence
  Synthetically generated peptide
  misc_feature (3)..(3): Xaa can be Cys or D-Cys
  misc_feature (7)..(7): Xaa can be Cys or D-Cys
  misc_feature (15)..(15): Xaa can be Cys or D-Cys
ASXCEFXCNPACTGXY

SEQ ID NO: 3135 - protein, 15 aa, Artificial Sequence
  Synthetically generated peptide
  misc_feature (3)..(3): Xaa can be Cys or D-Cys
  misc_feature (7)..(7): Xaa can be Cys or D-Cys
ASXCEFXCTPACTGC

SEQ ID NO: 3136 - protein, 16 aa, Artificial Sequence
  Synthetically generated peptide
  misc_feature (3)..(3): Xaa can be Cys or D-Cys
  misc_feature (7)..(7): Xaa can be Cys or D-Cys
ASXCEFXCTPACTGCK

SEQ ID NO: 3137 - protein, 16 aa, Artificial Sequence
  Synthetically generated peptide
  misc_feature (3)..(3): Xaa can be Cys or D-Cys
  misc_feature (7)..(7): Xaa can be Cys or D-Cys
ASXCEFXCTPACTGCY

SEQ ID NO: 3138 - protein, 15 aa, Artificial Sequence
  Synthetically generated peptide
  misc_feature (3)..(3): Xaa can be Cys or D-Cys
  misc_feature (7)..(7): Xaa can be Cys or D-Cys
  misc_feature (15)..(15): Xaa can be Cys or D-Cys
ASXCEFXCTPACTGX

SEQ ID NO: 3139 - protein, 16 aa, Artificial Sequence
  Synthetically generated peptide
  misc_feature (3)..(3): Xaa can be Cys or D-Cys
  misc_feature (7)..(7): Xaa can be Cys or D-Cys
  misc_feature (15)..(15): Xaa can be Cys or D-Cys
ASXCEFXCTPACTGXK

SEQ ID NO: 3140 - protein, 16 aa, Artificial Sequence
  Synthetically generated peptide
  misc_feature (3)..(3): Xaa can be Cys or D-Cys
  misc_feature (7)..(7): Xaa can be Cys or D-Cys
  misc_feature (15)..(15): Xaa can be Cys or D-Cys
ASXCEFXCTPACTGXY

SEQ ID NO: 3141 - protein, 15 aa, Artificial Sequence
  Synthetically generated peptide
  misc_feature (3)..(3): Xaa can be Cys or D-Cys
ASXCEWCCNPACTGC

SEQ ID NO: 3142 - protein, 16 aa, Artificial Sequence
  Synthetically generated peptide
  misc_feature (3)..(3): Xaa can be Cys or D-Cys
ASXCEWCCNPACTGCK

SEQ ID NO: 3143 - protein, 16 aa, Artificial Sequence
  Synthetically generated peptide
  misc_feature (3)..(3): Xaa can be Cys or D-Cys
ASXCEWCCNPACTGCY

SEQ ID NO: 3144 - protein, 15 aa, Artificial Sequence
  Synthetically generated peptide
  misc_feature (3)..(3): Xaa can be Cys or D-Cys
  misc_feature (15)..(15): Xaa can be Cys or D-Cys
ASXCEWCCNPACTGX

SEQ ID NO: 3145 - protein, 16 aa, Artificial Sequence
  Synthetically generated peptide
  misc_feature (3)..(3): Xaa can be Cys or D-Cys
  misc_feature (15)..(15): Xaa can be Cys or D-Cys
ASXCEWCCNPACTGXK

SEQ ID NO: 3146 - protein, 16 aa, Artificial Sequence
  Synthetically generated peptide
  misc_feature (3)..(3): Xaa can be Cys or D-Cys
  misc_feature (15)..(15): Xaa can be Cys or D-Cys
ASXCEWCCNPACTGXY

SEQ ID NO: 3147 - protein, 15 aa, Artificial Sequence
  Synthetically generated peptide
  misc_feature (3)..(3): Xaa can be Cys or D-Cys
ASXCEWCCTPACTGC

SEQ ID NO: 3148 - protein, 16 aa, Artificial Sequence
  Synthetically generated peptide
  misc_feature (3)..(3): Xaa can be Cys or D-Cys
ASXCEWCCTPACTGCK

SEQ ID NO: 3149 - protein, 16 aa, Artificial Sequence
  Synthetically generated peptide
  misc_feature (3)..(3): Xaa can be Cys or D-Cys
ASXCEWCCTPACTGCY

SEQ ID NO: 3150 - protein, 15 aa, Artificial Sequence
  Synthetically generated peptide
  misc_feature (3)..(3): Xaa can be Cys or D-Cys
  misc_feature (15)..(15): Xaa can be Cys or D-Cys
ASXCEWCCTPACTGX

SEQ ID NO: 3151 - protein, 16 aa, Artificial Sequence
  Synthetically generated peptide
  misc_feature (3)..(3): Xaa can be Cys or D-Cys
  misc_feature (15)..(15): Xaa can be Cys or D-Cys
ASXCEWCCTPACTGXK

SEQ ID NO: 3152 - protein, 16 aa, Artificial Sequence
  Synthetically generated peptide
  misc_feature (3)..(3): Xaa can be Cys or D-Cys
  misc_feature (15)..(15): Xaa can be Cys or D-Cys
ASXCEWCCTPACTGXY

SEQ ID NO: 3153 - protein, 15 aa, Artificial Sequence
  Synthetically generated peptide
  misc_feature (3)..(3): Xaa can be Cys or D-Cys
  misc_feature (7)..(7): Xaa can be Cys or D-Cys
ASXCEWXCNPACTGC

SEQ ID NO: 3154 - protein, 16 aa, Artificial Sequence
  Synthetically generated peptide
  misc_feature (3)..(3): Xaa can be Cys or D-Cys
  misc_feature (7)..(7): Xaa can be Cys or D-Cys
ASXCEWXCNPACTGCK

SEQ ID NO: 3155 - protein, 16 aa, Artificial Sequence
  Synthetically generated peptide
  misc_feature (3)..(3): Xaa can be Cys or D-Cys
  misc_feature (7)..(7): Xaa can be Cys or D-Cys
ASXCEWXCNPACTGCY

SEQ ID NO: 3156 - protein, 15 aa, Artificial Sequence
  Synthetically generated peptide
  misc_feature (3)..(3): Xaa can be Cys or D-Cys
  misc_feature (7)..(7): Xaa can be Cys or D-Cys
  misc_feature (15)..(15): Xaa can be Cys or D-Cys
ASXCEWXCNPACTGX

SEQ ID NO: 3157 - protein, 16 aa, Artificial Sequence
  Synthetically generated peptide
  misc_feature (3)..(3): Xaa can be Cys or D-Cys
  misc_feature (7)..(7): Xaa can be Cys or D-Cys
  misc_feature (15)..(15): Xaa can be Cys or D-Cys
ASXCEWXCNPACTGXK

SEQ ID NO: 3158 - protein, 16 aa, Artificial Sequence
  Synthetically generated peptide
  misc_feature (3)..(3): Xaa can be Cys or D-Cys
  misc_feature (7)..(7): Xaa can be Cys or D-Cys
  misc_feature (15)..(15): Xaa can be Cys or D-Cys
ASXCEWXCNPACTGXY

SEQ ID NO: 3159 - protein, 15 aa, Artificial Sequence
  Synthetically generated peptide
  misc_feature (3)..(3): Xaa can be Cys or D-Cys
  misc_feature (7)..(7): Xaa can be Cys or D-Cys
ASXCEWXCTPACTGC

SEQ ID NO: 3160 - protein, 16 aa, Artificial Sequence
  Synthetically generated peptide
  misc_feature (3)..(3): Xaa can be Cys or D-Cys
  misc_feature (7)..(7): Xaa can be Cys or D-Cys
ASXCEWXCTPACTGCK

SEQ ID NO: 3161 - protein, 16 aa, Artificial Sequence
  Synthetically generated peptide
  misc_feature (3)..(3): Xaa can be Cys or D-Cys
  misc_feature (7)..(7): Xaa can be Cys or D-Cys
ASXCEWXCTPACTGCY

SEQ ID NO: 3162 - protein, 15 aa, Artificial Sequence
  Synthetically generated peptide
  misc_feature (3)..(3): Xaa can be Cys or D-Cys
  misc_feature (7)..(7): Xaa can be Cys or D-Cys
  misc_feature (15)..(15): Xaa can be Cys or D-Cys
ASXCEWXCTPACTGX

SEQ ID NO: 3163 - protein, 16 aa, Artificial Sequence
  Synthetically generated peptide
  misc_feature (3)..(3): Xaa can be Cys or D-Cys
  misc_feature (7)..(7): Xaa can be Cys or D-Cys
  misc_feature (15)..(15): Xaa can be Cys or D-Cys
ASXCEWXCTPACTGXK

SEQ ID NO: 3164 - protein, 16 aa, Artificial Sequence
  Synthetically generated peptide
  misc_feature (3)..(3): Xaa can be Cys or D-Cys
  misc_feature (7)..(7): Xaa can be Cys or D-Cys
  misc_feature (15)..(15): Xaa can be Cys or D-Cys
ASXCEWXCTPACTGXY

SEQ ID NO: 3165 - protein, 15 aa, Artificial Sequence
  Synthetically generated peptide
AVCCEVCCNPACTGC

SEQ ID NO: 3166 - protein, 16 aa, Artificial Sequence
  Synthetically generated peptide
AVCCEVCCNPACTGCK

SEQ ID NO: 3167 - protein, 16 aa, Artificial Sequence
  Synthetically generated peptide
AVCCEVCCNPACTGCY

SEQ ID NO: 3168 - protein, 15 aa, Artificial Sequence
  Synthetically generated peptide
  misc_feature (15)..(15): Xaa can be Cys or D-Cys
AVCCEVCCNPACTGX

SEQ ID NO: 3169 - protein, 16 aa, Artificial Sequence
  Synthetically generated peptide
  misc_feature (15)..(15): Xaa can be Cys or D-Cys
AVCCEVCCNPACTGXK

SEQ ID NO: 3170 - protein, 16 aa, Artificial Sequence
  Synthetically generated peptide
  misc_feature (15)..(15): Xaa can be Cys or D-Cys
AVCCEVCCNPACTGXY

SEQ ID NO: 3171 - protein, 15 aa, Artificial Sequence
  Synthetically generated peptide
AVCCEVCCTPACTGC

SEQ ID NO: 3172 - protein, 16 aa, Artificial Sequence
  Synthetically generated peptide
AVCCEVCCTPACTGCK

SEQ ID NO: 3173 - protein, 16 aa, Artificial Sequence
  Synthetically generated peptide
AVCCEVCCTPACTGCY

SEQ ID NO: 3174 - protein, 15 aa, Artificial Sequence
  Synthetically generated peptide
  misc_feature (15)..(15): Xaa can be Cys or D-Cys
AVCCEVCCTPACTGX

SEQ ID NO: 3175 - protein, 16 aa, Artificial Sequence
  Synthetically generated peptide
  misc_feature (15)..(15): Xaa can be Cys or D-Cys
AVCCEVCCTPACTGXK

SEQ ID NO: 3176 - protein, 16 aa, Artificial Sequence
  Synthetically generated peptide
  misc_feature (15)..(15): Xaa can be Cys or D-Cys
AVCCEVCCTPACTGXY

SEQ ID NO: 3177 - protein, 15 aa, Artificial Sequence
  Synthetically generated peptide
  misc_feature (7)..(7): Xaa can be Cys or D-Cys
AVCCEVXCNPACTGC

SEQ ID NO: 3178 - protein, 16 aa, Artificial Sequence
  Synthetically generated peptide
  misc_feature (7)..(7): Xaa can be Cys or D-Cys
AVCCEVXCNPACTGCK

SEQ ID NO: 3179 - protein, 16 aa, Artificial Sequence
  Synthetically generated peptide
  misc_feature (7)..(7): Xaa can be Cys or D-Cys
AVCCEVXCNPACTGCY

SEQ ID NO: 3180 - protein, 15 aa, Artificial Sequence
  Synthetically generated peptide
  misc_feature (7)..(7): Xaa can be Cys or D-Cys
  misc_feature (15)..(15): Xaa can be Cys or D-Cys
AVCCEVXCNPACTGX

SEQ ID NO: 3181 - protein, 16 aa, Artificial Sequence
  Synthetically generated peptide
  misc_feature (7)..(7): Xaa can be Cys or D-Cys
  misc_feature (15)..(15): Xaa can be Cys or D-Cys
AVCCEVXCNPACTGXK

SEQ ID NO: 3182 - protein, 16 aa, Artificial Sequence
  Synthetically generated peptide
  misc_feature (7)..(7): Xaa can be Cys or D-Cys
  misc_feature (15)..(15): Xaa can be Cys or D-Cys
AVCCEVXCNPACTGXY

SEQ ID NO: 3183 - protein, 15 aa, Artificial Sequence
  Synthetically generated peptide
  misc_feature (7)..(7): Xaa can be Cys or D-Cys
AVCCEVXCTPACTGC

SEQ ID NO: 3184 - protein, 16 aa, Artificial Sequence
  Synthetically generated peptide
  misc_feature (7)..(7): Xaa can be Cys or D-Cys
AVCCEVXCTPACTGCK

SEQ ID NO: 3185 - protein, 16 aa, Artificial Sequence
  Synthetically generated peptide
  misc_feature (7)..(7): Xaa can be Cys or D-Cys
AVCCEVXCTPACTGCY

SEQ ID NO: 3186 - protein, 15 aa, Artificial Sequence
  Synthetically generated peptide
  misc_feature (7)..(7): Xaa can be Cys or D-Cys
  misc_feature (15)..(15): Xaa can be Cys or D-Cys
AVCCEVXCTPACTGX

SEQ ID NO: 3187 - protein, 16 aa, Artificial Sequence
  Synthetically generated peptide
  misc_feature (7)..(7): Xaa can be Cys or D-Cys
  misc_feature (15)..(15): Xaa can be Cys or D-Cys
AVCCEVXCTPACTGXK

SEQ ID NO: 3188 - protein, 16 aa, Artificial Sequence
  Synthetically generated peptide
  misc_feature (7)..(7): Xaa can be Cys or D-Cys
  misc_feature (15)..(15): Xaa can be Cys or D-Cys
AVCCEVXCTPACTGXY

SEQ ID NO: 3189 - protein, 15 aa, Artificial Sequence
  Synthetically generated peptide
AVCCEICCNPACTGC

SEQ ID NO: 3190 - protein, 16 aa, Artificial Sequence
  Synthetically generated peptide
AVCCEICCNPACTGCK

SEQ ID NO: 3191 - protein, 16 aa, Artificial Sequence
  Synthetically generated peptide
AVCCEICCNPACTGCY

SEQ ID NO: 3192 - protein, 15 aa, Artificial Sequence
  Synthetically generated peptide
  misc_feature (15)..(15): Xaa can be Cys or D-Cys
AVCCEICCNPACTGX

SEQ ID NO: 3193 - protein, 16 aa, Artificial Sequence
  Synthetically generated peptide
  misc_feature (15)..(15): Xaa can be Cys or D-Cys
AVCCEICCNPACTGXK

SEQ ID NO: 3194 - protein, 16 aa, Artificial Sequence
  Synthetically generated peptide
  misc_feature (15)..(15): Xaa can be Cys or D-Cys
AVCCEICCNPACTGXY

SEQ ID NO: 3195 - protein, 15 aa, Artificial Sequence
  Synthetically generated peptide
AVCCEICCTPACTGC

SEQ ID NO: 3196 - protein, 16 aa, Artificial Sequence
  Synthetically generated peptide
AVCCEICCTPACTGCK

SEQ ID NO: 3197 - protein, 16 aa, Artificial Sequence
  Synthetically generated peptide
AVCCEICCTPACTGCY

SEQ ID NO: 3198 - protein, 15 aa, Artificial Sequence
  Synthetically generated peptide
  misc_feature (15)..(15): Xaa can be Cys or D-Cys
AVCCEICCTPACTGX

SEQ ID NO: 3199 - protein, 16 aa, Artificial Sequence
  Synthetically generated peptide
  misc_feature (15)..(15): Xaa can be Cys or D-Cys
AVCCEICCTPACTGXK

SEQ ID NO: 3200 - protein, 16 aa, Artificial Sequence
  Synthetically generated peptide
  misc_feature (15)..(15): Xaa can be Cys or D-Cys
AVCCEICCTPACTGXY

SEQ ID NO: 3201 - protein, 15 aa, Artificial Sequence
  Synthetically generated peptide
  misc_feature (7)..(7): Xaa can be Cys or D-Cys
AVCCEIXCNPACTGC

SEQ ID NO: 3202 - protein, 16 aa, Artificial Sequence
  Synthetically generated peptide
  misc_feature (7)..(7): Xaa can be Cys or D-Cys
AVCCEIXCNPACTGCK

SEQ ID NO: 3203 - protein, 16 aa, Artificial Sequence
  Synthetically generated peptide
  misc_feature (7)..(7): Xaa can be Cys or D-Cys
AVCCEIXCNPACTGCY

SEQ ID NO: 3204 - protein, 15 aa, Artificial Sequence
  Synthetically generated peptide
  misc_feature (7)..(7): Xaa can be Cys or D-Cys
  misc_feature (15)..(15): Xaa can be Cys or D-Cys
AVCCEIXCNPACTGX

SEQ ID NO: 3205 - protein, 16 aa, Artificial Sequence
  Synthetically generated peptide
  misc_feature (7)..(7): Xaa can be Cys or D-Cys
  misc_feature (15)..(15): Xaa can be Cys or D-Cys
AVCCEIXCNPACTGXK

SEQ ID NO: 3206 - protein, 16 aa, Artificial Sequence
  Synthetically generated peptide
  misc_feature (7)..(7): Xaa can be Cys or D-Cys
  misc_feature (15)..(15): Xaa can be Cys or D-Cys
AVCCEIXCNPACTGXY

SEQ ID NO: 3207 - protein, 15 aa, Artificial Sequence
  Synthetically generated peptide
  misc_feature (7)..(7): Xaa can be Cys or D-Cys
AVCCEIXCTPACTGC

SEQ ID NO: 3208 - protein, 16 aa, Artificial Sequence
  Synthetically generated peptide
  misc_feature (7)..(7): Xaa can be Cys or D-Cys
AVCCEIXCTPACTGCK

SEQ ID NO: 3209 - protein, 16 aa, Artificial Sequence
  Synthetically generated peptide
  misc_feature (7)..(7): Xaa can be Cys or D-Cys
AVCCEIXCTPACTGCY

SEQ ID NO: 3210 - protein, 15 aa, Artificial Sequence
  Synthetically generated peptide
  misc_feature (7)..(7): Xaa can be Cys or D-Cys
  misc_feature (15)..(15): Xaa can be Cys or D-Cys
AVCCEIXCTPACTGX

SEQ ID NO: 3211 - protein, 16 aa, Artificial Sequence
  Synthetically generated peptide
  misc_feature (7)..(7): Xaa can be Cys or D-Cys
  misc_feature (15)..(15): Xaa can be Cys or D-Cys
AVCCEIXCTPACTGXK

SEQ ID NO: 3212 - protein, 16 aa, Artificial Sequence
  Synthetically generated peptide
  misc_feature (7)..(7): Xaa can be Cys or D-Cys
  misc_feature (15)..(15): Xaa can be Cys or D-Cys
AVCCEIXCTPACTGXY

SEQ ID NO: 3213 - protein, 15 aa, Artificial Sequence
  Synthetically generated peptide
AVCCELCCNPACTGC

SEQ ID NO: 3214 - protein, 16 aa, Artificial Sequence
  Synthetically generated peptide
AVCCELCCNPACTGCK

SEQ ID NO: 3215 - protein, 16 aa, Artificial Sequence
  Synthetically generated peptide
AVCCELCCNPACTGCY

SEQ ID NO: 3216 - protein, 15 aa, Artificial Sequence
  Synthetically generated peptide
  misc_feature (15)..(15): Xaa can be Cys or D-Cys
AVCCELCCNPACTGX

SEQ ID NO: 3217 - protein, 16 aa, Artificial Sequence
  Synthetically generated peptide
  misc_feature (15)..(15): Xaa can be Cys or D-Cys
AVCCELCCNPACTGXK

SEQ ID NO: 3218 - protein, 16 aa, Artificial Sequence
  Synthetically generated peptide
  misc_feature (15)..(15): Xaa can be Cys or D-Cys
AVCCELCCNPACTGXY

SEQ ID NO: 3219 - protein, 15 aa, Artificial Sequence
  Synthetically generated peptide
AVCCELCCTPACTGC

SEQ ID NO: 3220 - protein, 16 aa, Artificial Sequence
  Synthetically generated peptide
AVCCELCCTPACTGCK

SEQ ID NO: 3221 - protein, 16 aa, Artificial Sequence
  Synthetically generated peptide
AVCCELCCTPACTGCY

SEQ ID NO: 3222 - protein, 15 aa, Artificial Sequence
  Synthetically generated peptide
  misc_feature (15)..(15): Xaa can be Cys or D-Cys
AVCCELCCTPACTGX

SEQ ID NO: 3223 - protein, 16 aa, Artificial Sequence
  Synthetically generated peptide
  misc_feature (15)..(15): Xaa can be Cys or D-Cys
AVCCELCCTPACTGXK

SEQ ID NO: 3224 - protein, 16 aa, Artificial Sequence
  Synthetically generated peptide
  misc_feature (15)..(15): Xaa can be Cys or D-Cys
AVCCELCCTPACTGXY

SEQ ID NO: 3225 - protein, 15 aa, Artificial Sequence
  Synthetically generated peptide
  misc_feature (7)..(7): Xaa can be Cys or D-Cys
AVCCELXCNPACTGC

SEQ ID NO: 3226 - protein, 16 aa, Artificial Sequence
  Synthetically generated peptide
  misc_feature (7)..(7): Xaa can be Cys or D-Cys
AVCCELXCNPACTGCK

SEQ ID NO: 3227 - protein, 16 aa, Artificial Sequence
  Synthetically generated peptide
  misc_feature (7)..(7): Xaa can be Cys or D-Cys
AVCCELXCNPACTGCY

SEQ ID NO: 3228 - protein, 15 aa, Artificial Sequence
  Synthetically generated peptide
  misc_feature (7)..(7): Xaa can be Cys or D-Cys
  misc_feature (15)..(15): Xaa can be Cys or D-Cys
AVCCELXCNPACTGX

SEQ ID NO: 3229 - protein, 16 aa, Artificial Sequence
  Synthetically generated peptide
  misc_feature (7)..(7): Xaa can be Cys or D-Cys
  misc_feature (15)..(15): Xaa can be Cys or D-Cys
AVCCELXCNPACTGXK

SEQ ID NO: 3230 - protein, 16 aa, Artificial Sequence
  Synthetically generated peptide
  misc_feature (7)..(7): Xaa can be Cys or D-Cys
  misc_feature (15)..(15): Xaa can be Cys or D-Cys
AVCCELXCNPACTGXY

SEQ ID NO: 3231 - protein, 15 aa, Artificial Sequence
  Synthetically generated peptide
  misc_feature (7)..(7): Xaa can be Cys or D-Cys
AVCCELXCTPACTGC

SEQ ID NO: 3232 - protein, 16 aa, Artificial Sequence
  Synthetically generated peptide
  misc_feature (7)..(7): Xaa can be Cys or D-Cys
AVCCELXCTPACTGCK

SEQ ID NO: 3233 - protein, 16 aa, Artificial Sequence
  Synthetically generated peptide
  misc_feature (7)..(7): Xaa can be Cys or D-Cys
AVCCELXCTPACTGCY

SEQ ID NO: 3234 - protein, 15 aa, Artificial Sequence
  Synthetically generated peptide
  misc_feature (7)..(7): Xaa can be Cys or D-Cys
  misc_feature (15)..(15): Xaa can be Cys or D-Cys
AVCCELXCTPACTGX

SEQ ID NO: 3235 - protein, 16 aa, Artificial Sequence
  Synthetically generated peptide
  misc_feature (7)..(7): Xaa can be Cys or D-Cys
  misc_feature (15)..(15): Xaa can be Cys or D-Cys
AVCCELXCTPACTGXK

SEQ ID NO: 3236 - protein, 16 aa, Artificial Sequence
  Synthetically generated peptide
  misc_feature (7)..(7): Xaa can be Cys or D-Cys
  misc_feature (15)..(15): Xaa can be Cys or D-Cys
AVCCELXCTPACTGXY

SEQ ID NO: 3237 - protein, 15 aa, Artificial Sequence
  Synthetically generated peptide
AVCCEYCCNPACTGC

SEQ ID NO: 3238 - protein, 16 aa, Artificial Sequence
  Synthetically generated peptide
AVCCEYCCNPACTGCK

SEQ ID NO: 3239 - protein, 16 aa, Artificial Sequence
  Synthetically generated peptide
AVCCEYCCNPACTGCY

SEQ ID NO: 3240 - protein, 15 aa, Artificial Sequence
  Synthetically generated peptide
  misc_feature (15)..(15): Xaa can be Cys or D-Cys
AVCCEYCCNPACTGX

SEQ ID NO: 3241 - protein, 16 aa, Artificial Sequence
  Synthetically generated peptide
  misc_feature (15)..(15): Xaa can be Cys or D-Cys
AVCCEYCCNPACTGXK

SEQ ID NO: 3242 - protein, 16 aa, Artificial Sequence
  Synthetically generated peptide
  misc_feature (15)..(15): Xaa can be Cys or D-Cys
AVCCEYCCNPACTGXY

SEQ ID NO: 3243 - protein, 15 aa, Artificial Sequence
  Synthetically generated peptide
AVCCEYCCTPACTGC

SEQ ID NO: 3244 - protein, 16 aa, Artificial Sequence
  Synthetically generated peptide
AVCCEYCCTPACTGCK

SEQ ID NO: 3245 - protein, 16 aa, Artificial Sequence
  Synthetically generated peptide
AVCCEYCCTPACTGCY

SEQ ID NO: 3246 - protein, 15 aa, Artificial Sequence
  Synthetically generated peptide
  misc_feature (15)..(15): Xaa can be Cys or D-Cys
AVCCEYCCTPACTGX

SEQ ID NO: 3247 - protein, 16 aa, Artificial Sequence
  Synthetically generated peptide
  misc_feature (15)..(15): Xaa can be Cys or D-Cys
AVCCEYCCTPACTGXK

SEQ ID NO: 3248 - protein, 16 aa, Artificial Sequence
  Synthetically generated peptide
  misc_feature (15)..(15): Xaa can be Cys or D-Cys
AVCCEYCCTPACTGXY

SEQ ID NO: 3249 - protein, 15 aa, Artificial Sequence
  Synthetically generated peptide
  misc_feature (7)..(7): Xaa can be Cys or D-Cys
AVCCEYXCNPACTGC

SEQ ID NO: 3250 - protein, 16 aa, Artificial Sequence
  Synthetically generated peptide
  misc_feature (7)..(7): Xaa can be Cys or D-Cys
AVCCEYXCNPACTGCK

SEQ ID NO: 3251 - protein, 16 aa, Artificial Sequence
  Synthetically generated peptide
  misc_feature (7)..(7): Xaa can be Cys or D-Cys
AVCCEYXCNPACTGCY

SEQ ID NO: 3252 - protein, 15 aa, Artificial Sequence
  Synthetically generated peptide
  misc_feature (7)..(7): Xaa can be Cys or D-Cys
  misc_feature (15)..(15): Xaa can be Cys or D-Cys
AVCCEYXCNPACTGX

SEQ ID NO: 3253 - protein, 16 aa, Artificial Sequence
  Synthetically generated peptide
  misc_feature (7)..(7): Xaa can be Cys or D-Cys
  misc_feature (15)..(15): Xaa can be Cys or D-Cys
AVCCEYXCNPACTGXK

SEQ ID NO: 3254 - protein, 16 aa, Artificial Sequence
  Synthetically generated peptide
  misc_feature (7)..(7): Xaa can be Cys or D-Cys
  misc_feature (15)..(15): Xaa can be Cys or D-Cys
AVCCEYXCNPACTGXY

SEQ ID NO: 3255 - protein, 15 aa, Artificial Sequence
  Synthetically generated peptide
  misc_feature (7)..(7): Xaa can be Cys or D-Cys
AVCCEYXCTPACTGC

SEQ ID NO: 3256 - protein, 16 aa, Artificial Sequence
  Synthetically generated peptide
  misc_feature (7)..(7): Xaa can be Cys or D-Cys
AVCCEYXCTPACTGCK

SEQ ID NO: 3257 - protein, 16 aa, Artificial Sequence
  Synthetically generated peptide
  misc_feature (7)..(7): Xaa can be Cys or D-Cys
AVCCEYXCTPACTGCY

SEQ ID NO: 3258 - protein, 15 aa, Artificial Sequence
  Synthetically generated peptide
  misc_feature (7)..(7): Xaa can be Cys or D-Cys
  misc_feature (15)..(15): Xaa can be Cys or D-Cys
AVCCEYXCTPACTGX

SEQ ID NO: 3259 - protein, 16 aa, Artificial Sequence
  Synthetically generated peptide
  misc_feature (7)..(7): Xaa can be Cys or D-Cys
  misc_feature (15)..(15): Xaa can be Cys or D-Cys
AVCCEYXCTPACTGXK

SEQ ID NO: 3260 - protein, 16 aa, Artificial Sequence
  Synthetically generated peptide
  misc_feature (7)..(7): Xaa can be Cys or D-Cys
  misc_feature (15)..(15): Xaa can be Cys or D-Cys
AVCCEYXCTPACTGXY

SEQ ID NO: 3261 - protein, 15 aa, Artificial Sequence
  Synthetically generated peptide
AVCCEFCCNPACTGC

SEQ ID NO: 3262 - protein, 16 aa, Artificial Sequence
  Synthetically generated peptide
AVCCEFCCNPACTGCK

SEQ ID NO: 3263 - protein, 16 aa, Artificial Sequence
  Synthetically generated peptide
AVCCEFCCNPACTGCY

SEQ ID NO: 3264 - protein, 15 aa, Artificial Sequence
  Synthetically generated peptide
  misc_feature (15)..(15): Xaa can be Cys or D-Cys
AVCCEFCCNPACTGX

SEQ ID NO: 3265 - protein, 16 aa, Artificial Sequence
  Synthetically generated peptide
  misc_feature (15)..(15): Xaa can be Cys or D-Cys
AVCCEFCCNPACTGXK

SEQ ID NO: 3266 - protein, 16 aa, Artificial Sequence
  Synthetically generated peptide
  misc_feature (15)..(15): Xaa can be Cys or D-Cys
AVCCEFCCNPACTGXY

SEQ ID NO: 3267 - protein, 15 aa, Artificial Sequence
  Synthetically generated peptide
AVCCEFCCTPACTGC

SEQ ID NO: 3268 - protein, 16 aa, Artificial Sequence
  Synthetically generated peptide
AVCCEFCCTPACTGCK

SEQ ID NO: 3269 - protein, 16 aa, Artificial Sequence
  Synthetically generated peptide
AVCCEFCCTPACTGCY

SEQ ID NO: 3270 - protein, 15 aa, Artificial Sequence
  Synthetically generated peptide
  misc_feature (15)..(15): Xaa can be Cys or D-Cys
AVCCEFCCTPACTGX

SEQ ID NO: 3271 - protein, 16 aa, Artificial Sequence
  Synthetically generated peptide
  misc_feature (15)..(15): Xaa can be Cys or D-Cys
AVCCEFCCTPACTGXK

SEQ ID NO: 3272 - protein, 16 aa, Artificial Sequence
  Synthetically generated peptide
  misc_feature (15)..(15): Xaa can be Cys or D-Cys
AVCCEFCCTPACTGXY

SEQ ID NO: 3273 - protein, 15 aa, Artificial Sequence
  Synthetically generated peptide
  misc_feature (7)..(7): Xaa can be Cys or D-Cys
AVCCEFXCNPACTGC

SEQ ID NO: 3274 - protein, 16 aa, Artificial Sequence
  Synthetically generated peptide
  misc_feature (7)..(7): Xaa can be Cys or D-Cys
AVCCEFXCNPACTGCK

SEQ ID NO: 3275 - protein, 16 aa, Artificial Sequence
  Synthetically generated peptide
  misc_feature (7)..(7): Xaa can be Cys or D-Cys
AVCCEFXCNPACTGCY

SEQ ID NO: 3276 - protein, 15 aa, Artificial Sequence
  Synthetically generated peptide
  misc_feature (7)..(7): Xaa can be Cys or D-Cys
  misc_feature (15)..(15): Xaa can be Cys or D-Cys
AVCCEFXCNPACTGX

SEQ ID NO: 3277 - protein, 16 aa, Artificial Sequence
  Synthetically generated peptide
  misc_feature (7)..(7): Xaa can be Cys or D-Cys
  misc_feature (15)..(15): Xaa can be Cys or D-Cys
AVCCEFXCNPACTGXK

SEQ ID NO: 3278 - protein, 16 aa, Artificial Sequence
  Synthetically generated peptide
  misc_feature (7)..(7): Xaa can be Cys or D-Cys
  misc_feature (15)..(15): Xaa can be Cys or D-Cys
AVCCEFXCNPACTGXY

SEQ ID NO: 3279 - protein, 15 aa, Artificial Sequence
  Synthetically generated peptide
  misc_feature (7)..(7): Xaa can be Cys or D-Cys
AVCCEFXCTPACTGC

SEQ ID NO: 3280 - protein, 16 aa, Artificial Sequence
  Synthetically generated peptide
  misc_feature (7)..(7): Xaa can be Cys or D-Cys
AVCCEFXCTPACTGCK

SEQ ID NO: 3281 - protein, 16 aa, Artificial Sequence
  Synthetically generated peptide
  misc_feature (7)..(7): Xaa can be Cys or D-Cys
AVCCEFXCTPACTGCY

SEQ ID NO: 3282 - protein, 15 aa, Artificial Sequence
  Synthetically generated peptide
  misc_feature (7)..(7): Xaa can be Cys or D-Cys
  misc_feature (15)..(15): Xaa can be Cys or D-Cys
AVCCEFXCTPACTGX

SEQ ID NO: 3283 - protein, 16 aa, Artificial Sequence
  Synthetically generated peptide
  misc_feature (7)..(7): Xaa can be Cys or D-Cys
  misc_feature (15)..(15): Xaa can be Cys or D-Cys
AVCCEFXCTPACTGXK

SEQ ID NO: 3284 - protein, 16 aa, Artificial Sequence
  Synthetically generated peptide
  misc_feature (7)..(7): Xaa can be Cys or D-Cys
  misc_feature (15)..(15): Xaa can be Cys or D-Cys
AVCCEFXCTPACTGXY

SEQ ID NO: 3285 - protein, 15 aa, Artificial Sequence
  Synthetically generated peptide
AVCCEWCCNPACTGC

SEQ ID NO: 3286 - protein, 16 aa, Artificial Sequence
  Synthetically generated peptide
AVCCEWCCNPACTGCK

SEQ ID NO: 3287 - protein, 16 aa, Artificial Sequence
  Synthetically generated peptide
AVCCEWCCNPACTGCY

SEQ ID NO: 3288 - protein, 15 aa, Artificial Sequence
  Synthetically generated peptide
  misc_feature (15)..(15): Xaa can be Cys or D-Cys
AVCCEWCCNPACTGX

SEQ ID NO: 3289 - protein, 16 aa, Artificial Sequence
  Synthetically generated peptide
  misc_feature (15)..(15): Xaa can be Cys or D-Cys
AVCCEWCCNPACTGXK

SEQ ID NO: 3290 - protein, 16 aa, Artificial Sequence
  Synthetically generated peptide
  misc_feature (15)..(15): Xaa can be Cys or D-Cys
AVCCEWCCNPACTGXY

SEQ ID NO: 3291 - protein, 15 aa, Artificial Sequence
  Synthetically generated peptide
AVCCEWCCTPACTGC

SEQ ID NO: 3292 - protein, 16 aa, Artificial Sequence
  Synthetically generated peptide
AVCCEWCCTPACTGCK

SEQ ID NO: 3293 - protein, 16 aa, Artificial Sequence
  Synthetically generated peptide
AVCCEWCCTPACTGCY

SEQ ID NO: 3294 - protein, 15 aa, Artificial Sequence
  Synthetically generated peptide
  misc_feature (15)..(15): Xaa can be Cys or D-Cys
AVCCEWCCTPACTGX

SEQ ID NO: 3295 - protein, 16 aa, Artificial Sequence
  Synthetically generated peptide
  misc_feature (15)..(15): Xaa can be Cys or D-Cys
AVCCEWCCTPACTGXK

SEQ ID NO: 3296 - protein, 16 aa, Artificial Sequence
  Synthetically generated peptide
  misc_feature (15)..(15): Xaa can be Cys or D-Cys
AVCCEWCCTPACTGXY

SEQ ID NO: 3297 - protein, 15 aa, Artificial Sequence
  Synthetically generated peptide
  misc_feature (7)..(7): Xaa can be Cys or D-Cys
AVCCEWXCNPACTGC

SEQ ID NO: 3298 - protein, 16 aa, Artificial Sequence
  Synthetically generated peptide
  misc_feature (7)..(7): Xaa can be Cys or D-Cys
AVCCEWXCNPACTGCK

SEQ ID NO: 3299 - protein, 16 aa, Artificial Sequence
  Synthetically generated peptide
  misc_feature (7)..(7): Xaa can be Cys or D-Cys
AVCCEWXCNPACTGCY

SEQ ID NO: 3300 - protein, 15 aa, Artificial Sequence
  Synthetically generated peptide
  misc_feature (7)..(7): Xaa can be Cys or D-Cys
  misc_feature (15)..(15): Xaa can be Cys or D-Cys
AVCCEWXCNPACTGX

SEQ ID NO: 3301 - protein, 16 aa, Artificial Sequence
  Synthetically generated peptide
  misc_feature (7)..(7): Xaa can be Cys or D-Cys
  misc_feature (15)..(15): Xaa can be Cys or D-Cys
AVCCEWXCNPACTGXK

SEQ ID NO: 3302 - protein, 16 aa, Artificial Sequence
  Synthetically generated peptide
  misc_feature (7)..(7): Xaa can be Cys or D-Cys
  misc_feature (15)..(15): Xaa can be Cys or D-Cys
AVCCEWXCNPACTGXY

SEQ ID NO: 3303 - protein, 15 aa, Artificial Sequence
  Synthetically generated peptide
  misc_feature (7)..(7): Xaa can be Cys or D-Cys
AVCCEWXCTPACTGC

SEQ ID NO: 3304 - protein, 16 aa, Artificial Sequence
  Synthetically generated peptide
  misc_feature (7)..(7): Xaa can be Cys or D-Cys
AVCCEWXCTPACTGCK

SEQ ID NO: 3305 - protein, 16 aa, Artificial Sequence
  Synthetically generated peptide
  misc_feature (7)..(7): Xaa can be Cys or D-Cys
AVCCEWXCTPACTGCY

SEQ ID NO: 3306 - protein, 15 aa, Artificial Sequence
  Synthetically generated peptide
  misc_feature (7)..(7): Xaa can be Cys or D-Cys
  misc_feature (15)..(15): Xaa can be Cys or D-Cys
AVCCEWXCTPACTGX

SEQ ID NO: 3307 - protein, 16 aa, Artificial Sequence
  Synthetically generated peptide
  misc_feature (7)..(7): Xaa can be Cys or D-Cys
  misc_feature (15)..(15): Xaa can be Cys or D-Cys
AVCCEWXCTPACTGXK

SEQ ID NO: 3308 - protein, 16 aa, Artificial Sequence
  Synthetically generated peptide
  misc_feature (7)..(7): Xaa can be Cys or D-Cys
  misc_feature (15)..(15): Xaa can be Cys or D-Cys
AVCCEWXCTPACTGXY

SEQ ID NO: 3309 - protein, 15 aa, Artificial Sequence
  Synthetically generated peptide
  misc_feature (3)..(3): Xaa can be Cys or D-Cys
AVXCEVCCNPACTGC

SEQ ID NO: 3310 - protein, 16 aa, Artificial Sequence
  Synthetically generated peptide
  misc_feature (3)..(3): Xaa can be Cys or D-Cys
AVXCEVCCNPACTGCK

SEQ ID NO: 3311 - protein, 16 aa, Artificial Sequence
  Synthetically generated peptide
  misc_feature (3)..(3): Xaa can be Cys or D-Cys
AVXCEVCCNPACTGCY

SEQ ID NO: 3312 - protein, 15 aa, Artificial Sequence
  Synthetically generated peptide
  misc_feature (3)..(3): Xaa can be Cys or D-Cys
  misc_feature (15)..(15): Xaa can be Cys or D-Cys
AVXCEVCCNPACTGX

SEQ ID NO: 3313 - protein, 16 aa, Artificial Sequence
  Synthetically generated peptide
  misc_feature (3)..(3): Xaa can be Cys or D-Cys
  misc_feature (15)..(15): Xaa can be Cys or D-Cys
AVXCEVCCNPACTGXK

SEQ ID NO: 3314 - protein, 16 aa, Artificial Sequence
  Synthetically generated peptide
  misc_feature (3)..(3): Xaa can be Cys or D-Cys
  misc_feature (15)..(15): Xaa can be Cys or D-Cys
AVXCEVCCNPACTGXY

SEQ ID NO: 3315 - protein, 15 aa, Artificial Sequence
  Synthetically generated peptide
  misc_feature (3)..(3): Xaa can be Cys or D-Cys
AVXCEVCCTPACTGC

SEQ ID NO: 3316 - protein, 16 aa, Artificial Sequence
  Synthetically generated peptide
  misc_feature (3)..(3): Xaa can be Cys or D-Cys
AVXCEVCCTPACTGCK

SEQ ID NO: 3317 - protein, 16 aa, Artificial Sequence
  Synthetically generated peptide
  misc_feature (3)..(3): Xaa can be Cys or D-Cys
AVXCEVCCTPACTGCY

SEQ ID NO: 3318 - protein, 15 aa, Artificial Sequence
  Synthetically generated peptide
  misc_feature (3)..(3): Xaa can be Cys or D-Cys
  misc_feature (15)..(15): Xaa can be Cys or D-Cys
AVXCEVCCTPACTGX

SEQ ID NO: 3319 - protein, 16 aa, Artificial Sequence
  Synthetically generated peptide
  misc_feature (3)..(3): Xaa can be Cys or D-Cys
  misc_feature (15)..(15): Xaa can be Cys or D-Cys
AVXCEVCCTPACTGXK

SEQ ID NO: 3320 - protein, 16 aa, Artificial Sequence
  Synthetically generated peptide
  misc_feature (3)..(3): Xaa can be Cys or D-Cys
  misc_feature (15)..(15): Xaa can be Cys or D-Cys
AVXCEVCCTPACTGXY

SEQ ID NO: 3321 - protein, 15 aa, Artificial Sequence
  Synthetically generated peptide
  misc_feature (3)..(3): Xaa can be Cys or D-Cys
  misc_feature (7)..(7): Xaa can be Cys or D-Cys
AVXCEVXCNPACTGC

SEQ ID NO: 3322 - protein, 16 aa, Artificial Sequence
  Synthetically generated peptide
  misc_feature (3)..(3): Xaa can be Cys or D-Cys
  misc_feature (7)..(7): Xaa can be Cys or D-Cys
AVXCEVXCNPACTGCK

SEQ ID NO: 3323 - protein, 16 aa, Artificial Sequence
  Synthetically generated peptide
  misc_feature (3)..(3): Xaa can be Cys or D-Cys
  misc_feature (7)..(7): Xaa can be Cys or D-Cys
AVXCEVXCNPACTGCY

SEQ ID NO: 3324 - protein, 15 aa, Artificial Sequence
  Synthetically generated peptide
  misc_feature (3)..(3): Xaa can be Cys or D-Cys
  misc_feature (7)..(7): Xaa can be Cys or D-Cys
  misc_feature (15)..(15): Xaa can be Cys or D-Cys
AVXCEVXCNPACTGX

SEQ ID NO: 3325 - protein, 16 aa, Artificial Sequence
  Synthetically generated peptide
  misc_feature (3)..(3): Xaa can be Cys or D-Cys
  misc_feature (7)..(7): Xaa can be Cys or D-Cys
  misc_feature (15)..(15): Xaa can be Cys or D-Cys
AVXCEVXCNPACTGXK

SEQ ID NO: 3326 - protein, 16 aa, Artificial Sequence
  Synthetically generated peptide
  misc_feature (3)..(3): Xaa can be Cys or D-Cys
  misc_feature (7)..(7): Xaa can be Cys or D-Cys
  misc_feature (15)..(15): Xaa can be Cys or D-Cys
AVXCEVXCNPACTGXY

SEQ ID NO: 3327 - protein, 15 aa, Artificial Sequence
  Synthetically generated peptide
  misc_feature (3)..(3): Xaa can be Cys or D-Cys
  misc_feature (7)..(7): Xaa can be Cys or D-Cys
AVXCEVXCTPACTGC

SEQ ID NO: 3328 - protein, 16 aa, Artificial Sequence
  Synthetically generated peptide
  misc_feature (3)..(3): Xaa can be Cys or D-Cys
  misc_feature (7)..(7): Xaa can be Cys or D-Cys
AVXCEVXCTPACTGCK

SEQ ID NO: 3329 - protein, 16 aa, Artificial Sequence
  Synthetically generated peptide
  misc_feature (3)..(3): Xaa can be Cys or D-Cys
  misc_feature (7)..(7): Xaa can be Cys or D-Cys
AVXCEVXCTPACTGCY

SEQ ID NO: 3330 - protein, 15 aa, Artificial Sequence
  Synthetically generated peptide
  misc_feature (3)..(3): Xaa can be Cys or D-Cys
  misc_feature (7)..(7): Xaa can be Cys or D-Cys
  misc_feature (15)..(15): Xaa can be Cys or D-Cys
AVXCEVXCTPACTGX

SEQ ID NO: 3331 - protein, 16 aa, Artificial Sequence
  Synthetically generated peptide
  misc_feature (3)..(3): Xaa can be Cys or D-Cys
  misc_feature (7)..(7): Xaa can be Cys or D-Cys
  misc_feature (15)..(15): Xaa can be Cys or D-Cys
AVXCEVXCTPACTGXK

SEQ ID NO: 3332 - protein, 16 aa, Artificial Sequence
  Synthetically generated peptide
  misc_feature (3)..(3): Xaa can be Cys or D-Cys
  misc_feature (7)..(7): Xaa can be Cys or D-Cys
  misc_feature (15)..(15): Xaa can be Cys or D-Cys
AVXCEVXCTPACTGXY

SEQ ID NO: 3333 - protein, 15 aa, Artificial Sequence
  Synthetically generated peptide
  misc_feature (3)..(3): Xaa can be Cys or D-Cys
AVXCEICCNPACTGC

SEQ ID NO: 3334 - protein, 16 aa, Artificial Sequence
  Synthetically generated peptide
  misc_feature (3)..(3): Xaa can be Cys or D-Cys
AVXCEICCNPACTGCK

SEQ ID NO: 3335 - protein, 16 aa, Artificial Sequence
  Synthetically generated peptide
  misc_feature (3)..(3): Xaa can be Cys or D-Cys
AVXCEICCNPACTGCY

SEQ ID NO: 3336 - protein, 15 aa, Artificial Sequence
  Synthetically generated peptide
  misc_feature (3)..(3): Xaa can be Cys or D-Cys
  misc_feature (15)..(15): Xaa can be Cys or D-Cys
AVXCEICCNPACTGX

SEQ ID NO: 3337 - protein, 16 aa, Artificial Sequence
  Synthetically generated peptide
  misc_feature (3)..(3): Xaa can be Cys or D-Cys
  misc_feature (15)..(15): Xaa can be Cys or D-Cys
AVXCEICCNPACTGXK

SEQ ID NO: 3338 - protein, 16 aa, Artificial Sequence
  Synthetically generated peptide
  misc_feature (3)..(3): Xaa can be Cys or D-Cys
  misc_feature (15)..(15): Xaa can be Cys or D-Cys
AVXCEICCNPACTGXY

SEQ ID NO: 3339 - protein, 15 aa, Artificial Sequence
  Synthetically generated peptide
  misc_feature (3)..(3): Xaa can be Cys or D-Cys
AVXCEICCTPACTGC

SEQ ID NO: 3340 - protein, 16 aa, Artificial Sequence
  Synthetically generated peptide
  misc_feature (3)..(3): Xaa can be Cys or D-Cys
AVXCEICCTPACTGCK

SEQ ID NO: 3341 - protein, 16 aa, Artificial Sequence
  Synthetically generated peptide
  misc_feature (3)..(3): Xaa can be Cys or D-Cys
AVXCEICCTPACTGCY

SEQ ID NO: 3342 - protein, 15 aa, Artificial Sequence
  Synthetically generated peptide
  misc_feature (3)..(3): Xaa can be Cys or D-Cys
  misc_feature (15)..(15): Xaa can be Cys or D-Cys
AVXCEICCTPACTGX

SEQ ID NO: 3343 - protein, 16 aa, Artificial Sequence
  Synthetically generated peptide
  misc_feature (3)..(3): Xaa can be Cys or D-Cys
  misc_feature (15)..(15): Xaa can be Cys or D-Cys
AVXCEICCTPACTGXK

SEQ ID NO: 3344 - protein, 16 aa, Artificial Sequence
  Synthetically generated peptide
  misc_feature (3)..(3): Xaa can be Cys or D-Cys
  misc_feature (15)..(15): Xaa can be Cys or D-Cys
AVXCEICCTPACTGXY

SEQ ID NO: 3345 - protein, 15 aa, Artificial Sequence
  Synthetically generated peptide
  misc_feature (3)..(3): Xaa can be Cys or D-Cys
  misc_feature (7)..(7): Xaa can be Cys or D-Cys
AVXCEIXCNPACTGC

SEQ ID NO: 3346 - protein, 16 aa, Artificial Sequence
  Synthetically generated peptide
  misc_feature (3)..(3): Xaa can be Cys or D-Cys
  misc_feature (7)..(7): Xaa can be Cys or D-Cys
AVXCEIXCNPACTGCK

SEQ ID NO: 3347 - protein, 16 aa, Artificial Sequence
  Synthetically generated peptide
  misc_feature (3)..(3): Xaa can be Cys or D-Cys
  misc_feature (7)..(7): Xaa can be Cys or D-Cys
AVXCEIXCNPACTGCY

SEQ ID NO: 3348 - protein, 15 aa, Artificial Sequence
  Synthetically generated peptide
  misc_feature (3)..(3): Xaa can be Cys or D-Cys
  misc_feature (7)..(7): Xaa can be Cys or D-Cys
  misc_feature (15)..(15): Xaa can be Cys or D-Cys
AVXCEIXCNPACTGX

SEQ ID NO: 3349 - protein, 16 aa, Artificial Sequence
  Synthetically generated peptide
  misc_feature (3)..(3): Xaa can be Cys or D-Cys
  misc_feature (7)..(7): Xaa can be Cys or D-Cys
  misc_feature (15)..(15): Xaa can be Cys or D-Cys
AVXCEIXCNPACTGXK

SEQ ID NO: 3350 - protein, 16 aa, Artificial Sequence
  Synthetically generated peptide
  misc_feature (3)..(3): Xaa can be Cys or D-Cys
  misc_feature (7)..(7): Xaa can be Cys or D-Cys
  misc_feature (15)..(15): Xaa can be Cys or D-Cys
AVXCEIXCNPACTGXY

SEQ ID NO: 3351 - protein, 15 aa, Artificial Sequence
  Synthetically generated peptide
  misc_feature (3)..(3): Xaa can be Cys or D-Cys
  misc_feature (7)..(7): Xaa can be Cys or D-Cys
AVXCEIXCTPACTGC

SEQ ID NO: 3352 - protein, 16 aa, Artificial Sequence
  Synthetically generated peptide
  misc_feature (3)..(3): Xaa can be Cys or D-Cys
  misc_feature (7)..(7): Xaa can be Cys or D-Cys
AVXCEIXCTPACTGCK

SEQ ID NO: 3353 - protein, 16 aa, Artificial Sequence
  Synthetically generated peptide
  misc_feature (3)..(3): Xaa can be Cys or D-Cys
  misc_feature (7)..(7): Xaa can be Cys or D-Cys
AVXCEIXCTPACTGCY

SEQ ID NO: 3354 - protein, 15 aa, Artificial Sequence
  Synthetically generated peptide
  misc_feature (3)..(3): Xaa can be Cys or D-Cys
  misc_feature (7)..(7): Xaa can be Cys or D-Cys
  misc_feature (15)..(15): Xaa can be Cys or D-Cys
AVXCEIXCTPACTGX

SEQ ID NO: 3355 - protein, 16 aa, Artificial Sequence
  Synthetically generated peptide
  misc_feature (3)..(3): Xaa can be Cys or D-Cys
  misc_feature (7)..(7): Xaa can be Cys or D-Cys
  misc_feature (15)..(15): Xaa can be Cys or D-Cys
AVXCEIXCTPACTGXK

SEQ ID NO: 3356 - protein, 16 aa, Artificial Sequence
  Synthetically generated peptide
  misc_feature (3)..(3): Xaa can be Cys or D-Cys
  misc_feature (7)..(7): Xaa can be Cys or D-Cys
  misc_feature (15)..(15): Xaa can be Cys or D-Cys
AVXCEIXCTPACTGXY

SEQ ID NO: 3357 - protein, 15 aa, Artificial Sequence
  Synthetically generated peptide
  misc_feature (3)..(3): Xaa can be Cys or D-Cys
AVXCELCCNPACTGC

SEQ ID NO: 3358 - protein, 16 aa, Artificial Sequence
  Synthetically generated peptide
  misc_feature (3)..(3): Xaa can be Cys or D-Cys
AVXCELCCNPACTGCK

SEQ ID NO: 3359 - protein, 16 aa, Artificial Sequence
  Synthetically generated peptide
  misc_feature (3)..(3): Xaa can be Cys or D-Cys
AVXCELCCNPACTGCY

SEQ ID NO: 3360 - protein, 15 aa, Artificial Sequence
  Synthetically generated peptide
  misc_feature (3)..(3): Xaa can be Cys or D-Cys
  misc_feature (15)..(15): Xaa can be Cys or D-Cys
AVXCELCCNPACTGX

SEQ ID NO: 3361 - protein, 16 aa, Artificial Sequence
  Synthetically generated peptide
  misc_feature (3)..(3): Xaa can be Cys or D-Cys
  misc_feature (15)..(15): Xaa can be Cys or D-Cys
AVXCELCCNPACTGXK

SEQ ID NO: 3362 - protein, 16 aa, Artificial Sequence
  Synthetically generated peptide
  misc_feature (3)..(3): Xaa can be Cys or D-Cys
  misc_feature (15)..(15): Xaa can be Cys or D-Cys
AVXCELCCNPACTGXY

SEQ ID NO: 3363 - protein, 15 aa, Artificial Sequence
  Synthetically generated peptide
  misc_feature (3)..(3): Xaa can be Cys or D-Cys
AVXCELCCTPACTGC

SEQ ID NO: 3364 - protein, 16 aa, Artificial Sequence
  Synthetically generated peptide
  misc_feature (3)..(3): Xaa can be Cys or D-Cys
AVXCELCCTPACTGCK

SEQ ID NO: 3365 - protein, 16 aa, Artificial Sequence
  Synthetically generated peptide
  misc_feature (3)..(3): Xaa can be Cys or D-Cys
AVXCELCCTPACTGCY

SEQ ID NO: 3366 - protein, 15 aa, Artificial Sequence
  Synthetically generated peptide
  misc_feature (3)..(3): Xaa can be Cys or D-Cys
  misc_feature (15)..(15): Xaa can be Cys or D-Cys
AVXCELCCTPACTGX

SEQ ID NO: 3367 - protein, 16 aa, Artificial Sequence
  Synthetically generated peptide
  misc_feature (3)..(3): Xaa can be Cys or D-Cys
  misc_feature (15)..(15): Xaa can be Cys or D-Cys
AVXCELCCTPACTGXK

SEQ ID NO: 3368 - protein, 16 aa, Artificial Sequence
  Synthetically generated peptide
  misc_feature (3)..(3): Xaa can be Cys or D-Cys
  misc_feature (15)..(15): Xaa can be Cys or D-Cys
AVXCELCCTPACTGXY

SEQ ID NO: 3369 - protein, 15 aa, Artificial Sequence
  Synthetically generated peptide
  misc_feature (3)..(3): Xaa can be Cys or D-Cys
  misc_feature (7)..(7): Xaa can be Cys or D-Cys
AVXCELXCNPACTGC

SEQ ID NO: 3370 - protein, 16 aa, Artificial Sequence
  Synthetically generated peptide
  misc_feature (3)..(3): Xaa can be Cys or D-Cys
  misc_feature (7)..(7): Xaa can be Cys or D-Cys
AVXCELXCNPACTGCK

SEQ ID NO: 3371 - protein, 16 aa, Artificial Sequence
  Synthetically generated peptide
  misc_feature (3)..(3): Xaa can be Cys or D-Cys
  misc_feature (7)..(7): Xaa can be Cys or D-Cys
AVXCELXCNPACTGCY

SEQ ID NO: 3372 - protein, 15 aa, Artificial Sequence
  Synthetically generated peptide
  misc_feature (3)..(3): Xaa can be Cys or D-Cys
  misc_feature (7)..(7): Xaa can be Cys or D-Cys
  misc_feature (15)..(15): Xaa can be Cys or D-Cys
AVXCELXCNPACTGX

SEQ ID NO: 3373 - protein, 16 aa, Artificial Sequence
  Synthetically generated peptide
  misc_feature (3)..(3): Xaa can be Cys or D-Cys
  misc_feature (7)..(7): Xaa can be Cys or D-Cys
  misc_feature (15)..(15): Xaa can be Cys or D-Cys
AVXCELXCNPACTGXK

SEQ ID NO: 3374 - protein, 16 aa, Artificial Sequence
  Synthetically generated peptide
  misc_feature (3)..(3): Xaa can be Cys or D-Cys
  misc_feature (7)..(7): Xaa can be Cys or D-Cys
  misc_feature (15)..(15): Xaa can be Cys or D-Cys
AVXCELXCNPACTGXY

SEQ ID NO: 3375 - protein, 15 aa, Artificial Sequence
  Synthetically generated peptide
  misc_feature (3)..(3): Xaa can be Cys or D-Cys
  misc_feature (7)..(7): Xaa can be Cys or D-Cys
AVXCELXCTPACTGC

SEQ ID NO: 3376 - protein, 16 aa, Artificial Sequence
  Synthetically generated peptide
  misc_feature (3)..(3): Xaa can be Cys or D-Cys
  misc_feature (7)..(7): Xaa can be Cys or D-Cys
AVXCELXCTPACTGCK

SEQ ID NO: 3377 - protein, 16 aa, Artificial Sequence
  Synthetically generated peptide
  misc_feature (3)..(3): Xaa can be Cys or D-Cys
  misc_feature (7)..(7): Xaa can be Cys or D-Cys
AVXCELXCTPACTGCY

SEQ ID NO: 3378 - protein, 15 aa, Artificial Sequence
  Synthetically generated peptide
  misc_feature (3)..(3): Xaa can be Cys or D-Cys
  misc_feature (7)..(7): Xaa can be Cys or D-Cys
  misc_feature (15)..(15): Xaa can be Cys or D-Cys
AVXCELXCTPACTGX

SEQ ID NO: 3379 - protein, 16 aa, Artificial Sequence
  Synthetically generated peptide
  misc_feature (3)..(3): Xaa can be Cys or D-Cys
  misc_feature (7)..(7): Xaa can be Cys or D-Cys
  misc_feature (15)..(15): Xaa can be Cys or D-Cys
AVXCELXCTPACTGXK

SEQ ID NO: 3380 - protein, 16 aa, Artificial Sequence
  Synthetically generated peptide
  misc_feature (3)..(3): Xaa can be Cys or D-Cys
  misc_feature (7)..(7): Xaa can be Cys or D-Cys
  misc_feature (15)..(15): Xaa can be Cys or D-Cys
AVXCELXCTPACTGXY

SEQ ID NO: 3381 - protein, 15 aa, Artificial Sequence
  Synthetically generated peptide
  misc_feature (3)..(3): Xaa can be Cys or D-Cys
AVXCEYCCNPACTGC

SEQ ID NO: 3382 - protein, 16 aa, Artificial Sequence
  Synthetically generated peptide
  misc_feature (3)..(3): Xaa can be Cys or D-Cys
AVXCEYCCNPACTGCK

SEQ ID NO: 3383 - protein, 16 aa, Artificial Sequence
  Synthetically generated peptide
  misc_feature (3)..(3): Xaa can be Cys or D-Cys
AVXCEYCCNPACTGCY

SEQ ID NO: 3384 - protein, 15 aa, Artificial Sequence
  Synthetically generated peptide
  misc_feature (3)..(3): Xaa can be Cys or D-Cys
  misc_feature (15)..(15): Xaa can be Cys or D-Cys
AVXCEYCCNPACTGX

SEQ ID NO: 3385 - protein, 16 aa, Artificial Sequence
  Synthetically generated peptide
  misc_feature (3)..(3): Xaa can be Cys or D-Cys
  misc_feature (15)..(15): Xaa can be Cys or D-Cys
AVXCEYCCNPACTGXK

SEQ ID NO: 3386 - protein, 16 aa, Artificial Sequence
  Synthetically generated peptide
  misc_feature (3)..(3): Xaa can be Cys or D-Cys
  misc_feature (15)..(15): Xaa can be Cys or D-Cys
AVXCEYCCNPACTGXY

SEQ ID NO: 3387 - protein, 15 aa, Artificial Sequence
  Synthetically generated peptide
  misc_feature (3)..(3): Xaa can be Cys or D-Cys
AVXCEYCCTPACTGC

SEQ ID NO: 3388 - protein, 16 aa, Artificial Sequence
  Synthetically generated peptide
  misc_feature (3)..(3): Xaa can be Cys or D-Cys
AVXCEYCCTPACTGCK

SEQ ID NO: 3389 - protein, 16 aa, Artificial Sequence
  Synthetically generated peptide
  misc_feature (3)..(3): Xaa can be Cys or D-Cys
AVXCEYCCTPACTGCY

SEQ ID NO: 3390 - protein, 15 aa, Artificial Sequence
  Synthetically generated peptide
  misc_feature (3)..(3): Xaa can be Cys or D-Cys
  misc_feature (15)..(15): Xaa can be Cys or D-Cys
AVXCEYCCTPACTGX

SEQ ID NO: 3391 - protein, 16 aa, Artificial Sequence
  Synthetically generated peptide
  misc_feature (3)..(3): Xaa can be Cys or D-Cys
  misc_feature (15)..(15): Xaa can be Cys or D-Cys
AVXCEYCCTPACTGXK

SEQ ID NO: 3392 - protein, 16 aa, Artificial Sequence
  Synthetically generated peptide
  misc_feature (3)..(3): Xaa can be Cys or D-Cys
  misc_feature (15)..(15): Xaa can be Cys or D-Cys
AVXCEYCCTPACTGXY

SEQ ID NO: 3393 - protein, 15 aa, Artificial Sequence
  Synthetically generated peptide
  misc_feature (3)..(3): Xaa can be Cys or D-Cys
  misc_feature (7)..(7): Xaa can be Cys or D-Cys
AVXCEYXCNPACTGC

SEQ ID NO: 3394 - protein, 16 aa, Artificial Sequence
  Synthetically generated peptide
  misc_feature (3)..(3): Xaa can be Cys or D-Cys
  misc_feature (7)..(7): Xaa can be Cys or D-Cys
AVXCEYXCNPACTGCK

SEQ ID NO: 3395 - protein, 16 aa, Artificial Sequence
  Synthetically generated peptide
  misc_feature (3)..(3): Xaa can be Cys or D-Cys
  misc_feature (7)..(7): Xaa can be Cys or D-Cys
AVXCEYXCNPACTGCY

SEQ ID NO: 3396 - protein, 15 aa, Artificial Sequence
  Synthetically generated peptide
  misc_feature (3)..(3): Xaa can be Cys or D-Cys
  misc_feature (7)..(7): Xaa can be Cys or D-Cys
  misc_feature (15)..(15): Xaa can be Cys or D-Cys
AVXCEYXCNPACTGX

SEQ ID NO: 3397 - protein, 16 aa, Artificial Sequence
  Synthetically generated peptide
  misc_feature (3)..(3): Xaa can be Cys or D-Cys
  misc_feature (7)..(7): Xaa can be Cys or D-Cys
  misc_feature (15)..(15): Xaa can be Cys or D-Cys
AVXCEYXCNPACTGXK

SEQ ID NO: 3398 - protein, 16 aa, Artificial Sequence
  Synthetically generated peptide
  misc_feature (3)..(3): Xaa can be Cys or D-Cys
  misc_feature (7)..(7): Xaa can be Cys or D-Cys
  misc_feature (15)..(15): Xaa can be Cys or D-Cys
AVXCEYXCNPACTGXY

SEQ ID NO: 3399 - protein, 15 aa, Artificial Sequence
  Synthetically generated peptide
  misc_feature (3)..(3): Xaa can be Cys or D-Cys
  misc_feature (7)..(7): Xaa can be Cys or D-Cys
AVXCEYXCTPACTGC

SEQ ID NO: 3400 - protein, 16 aa, Artificial Sequence
  Synthetically generated peptide
  misc_feature (3)..(3): Xaa can be Cys or D-Cys
  misc_feature (7)..(7): Xaa can be Cys or D-Cys
AVXCEYXCTPACTGCK

SEQ ID NO: 3401 - protein, 16 aa, Artificial Sequence
  Synthetically generated peptide
  misc_feature (3)..(3): Xaa can be Cys or D-Cys
  misc_feature (7)..(7): Xaa can be Cys or D-Cys
AVXCEYXCTPACTGCY

SEQ ID NO: 3402 - protein, 15 aa, Artificial Sequence
  Synthetically generated peptide
  misc_feature (3)..(3): Xaa can be Cys or D-Cys
  misc_feature (7)..(7): Xaa can be Cys or D-Cys
  misc_feature (15)..(15): Xaa can be Cys or D-Cys
AVXCEYXCTPACTGX

SEQ ID NO: 3403 - protein, 16 aa, Artificial Sequence
  Synthetically generated peptide
  misc_feature (3)..(3): Xaa can be Cys or D-Cys
  misc_feature (7)..(7): Xaa can be Cys or D-Cys
  misc_feature (15)..(15): Xaa can be Cys or D-Cys
AVXCEYXCTPACTGXK

SEQ ID NO: 3404 - protein, 16 aa, Artificial Sequence
  Synthetically generated peptide
  misc_feature (3)..(3): Xaa can be Cys or D-Cys
  misc_feature (7)..(7): Xaa can be Cys or D-Cys
  misc_feature (15)..(15): Xaa can be Cys or D-Cys
AVXCEYXCTPACTGXY

SEQ ID NO: 3405 - protein, 15 aa, Artificial Sequence
  Synthetically generated peptide
  misc_feature (3)..(3): Xaa can be Cys or D-Cys
AVXCEFCCNPACTGC

SEQ ID NO: 3406 - protein, 16 aa, Artificial Sequence
  Synthetically generated peptide
  misc_feature (3)..(3): Xaa can be Cys or D-Cys
AVXCEFCCNPACTGCK

SEQ ID NO: 3407 - protein, 16 aa, Artificial Sequence
  Synthetically generated peptide
  misc_feature (3)..(3): Xaa can be Cys or D-Cys
AVXCEFCCNPACTGCY

SEQ ID NO: 3408 - protein, 15 aa, Artificial Sequence
  Synthetically generated peptide
  misc_feature (3)..(3): Xaa can be Cys or D-Cys
  misc_feature (15)..(15): Xaa can be Cys or D-Cys
AVXCEFCCNPACTGX

SEQ ID NO: 3409 - protein, 16 aa, Artificial Sequence
  Synthetically generated peptide
  misc_feature (3)..(3): Xaa can be Cys or D-Cys
  misc_feature (15)..(15): Xaa can be Cys or D-Cys
AVXCEFCCNPACTGXK

SEQ ID NO: 3410 - protein, 16 aa, Artificial Sequence
  Synthetically generated peptide
  misc_feature (3)..(3): Xaa can be Cys or D-Cys
  misc_feature (15)..(15): Xaa can be Cys or D-Cys
AVXCEFCCNPACTGXY

SEQ ID NO: 3411 - protein, 15 aa, Artificial Sequence
  Synthetically generated peptide
  misc_feature (3)..(3): Xaa can be Cys or D-Cys
AVXCEFCCTPACTGC

SEQ ID NO: 3412 - protein, 16 aa, Artificial Sequence
  Synthetically generated peptide
  misc_feature (3)..(3): Xaa can be Cys or D-Cys
AVXCEFCCTPACTGCK

SEQ ID NO: 3413 - protein, 16 aa, Artificial Sequence
  Synthetically generated peptide
  misc_feature (3)..(3): Xaa can be Cys or D-Cys
AVXCEFCCTPACTGCY

SEQ ID NO: 3414 - protein, 15 aa, Artificial Sequence
  Synthetically generated peptide
  misc_feature (3)..(3): Xaa can be Cys or D-Cys
  misc_feature (15)..(15): Xaa can be Cys or D-Cys
AVXCEFCCTPACTGX

SEQ ID NO: 3415 - protein, 16 aa, Artificial Sequence
  Synthetically generated peptide
  misc_feature (3)..(3): Xaa can be Cys or D-Cys
  misc_feature (15)..(15): Xaa can be Cys or D-Cys
AVXCEFCCTPACTGXK

SEQ ID NO: 3416 - protein, 16 aa, Artificial Sequence
  Synthetically generated peptide
  misc_feature (3)..(3): Xaa can be Cys or D-Cys
  misc_feature (15)..(15): Xaa can be Cys or D-Cys
AVXCEFCCTPACTGXY

SEQ ID NO: 3417 - protein, 15 aa, Artificial Sequence
  Synthetically generated peptide
  misc_feature (3)..(3): Xaa can be Cys or D-Cys
  misc_feature (7)..(7): Xaa can be Cys or D-Cys
AVXCEFXCNPACTGC

SEQ ID NO: 3418 - protein, 16 aa, Artificial Sequence
  Synthetically generated peptide
  misc_feature (3)..(3): Xaa can be Cys or D-Cys
  misc_feature (7)..(7): Xaa can be Cys or D-Cys
AVXCEFXCNPACTGCK

SEQ ID NO: 3419 - protein, 16 aa, Artificial Sequence
  Synthetically generated peptide
  misc_feature (3)..(3): Xaa can be Cys or D-Cys
  misc_feature (7)..(7): Xaa can be Cys or D-Cys
AVXCEFXCNPACTGCY

SEQ ID NO: 3420 - protein, 15 aa, Artificial Sequence
  Synthetically generated peptide
  misc_feature (3)..(3): Xaa can be Cys or D-Cys
  misc_feature (7)..(7): Xaa can be Cys or D-Cys
  misc_feature (15)..(15): Xaa can be Cys or D-Cys
AVXCEFXCNPACTGX

SEQ ID NO: 3421 - protein, 16 aa, Artificial Sequence
  Synthetically generated peptide
  misc_feature (3)..(3): Xaa can be Cys or D-Cys
  misc_feature (7)..(7): Xaa can be Cys or D-Cys
  misc_feature (15)..(15): Xaa can be Cys or D-Cys
AVXCEFXCNPACTGXK

SEQ ID NO: 3422 - protein, 16 aa, Artificial Sequence
  Synthetically generated peptide
  misc_feature (3)..(3): Xaa can be Cys or D-Cys
  misc_feature (7)..(7): Xaa can be Cys or D-Cys
  misc_feature (15)..(15): Xaa can be Cys or D-Cys
AVXCEFXCNPACTGXY

SEQ ID NO: 3423 - protein, 15 aa, Artificial Sequence
  Synthetically generated peptide
  misc_feature (3)..(3): Xaa can be Cys or D-Cys
  misc_feature (7)..(7): Xaa can be Cys or D-Cys
AVXCEFXCTPACTGC

SEQ ID NO: 3424 - protein, 16 aa, Artificial Sequence
  Synthetically generated peptide
  misc_feature (3)..(3): Xaa can be Cys or D-Cys
  misc_feature (7)..(7): Xaa can be Cys or D-Cys
AVXCEFXCTPACTGCK

SEQ ID NO: 3425 - protein, 16 aa, Artificial Sequence
  Synthetically generated peptide
  misc_feature (3)..(3): Xaa can be Cys or D-Cys
  misc_feature (7)..(7): Xaa can be Cys or D-Cys
AVXCEFXCTPACTGCY

SEQ ID NO: 3426 - protein, 15 aa, Artificial Sequence
  Synthetically generated peptide
  misc_feature (3)..(3): Xaa can be Cys or D-Cys
  misc_feature (7)..(7): Xaa can be Cys or D-Cys
  misc_feature (15)..(15): Xaa can be Cys or D-Cys
AVXCEFXCTPACTGX

SEQ ID NO: 3427 - protein, 16 aa, Artificial Sequence
  Synthetically generated peptide
  misc_feature (3)..(3): Xaa can be Cys or D-Cys
  misc_feature (7)..(7): Xaa can be Cys or D-Cys
  misc_feature (15)..(15): Xaa can be Cys or D-Cys
AVXCEFXCTPACTGXK

SEQ ID NO: 3428 - protein, 16 aa, Artificial Sequence
  Synthetically generated peptide
  misc_feature (3)..(3): Xaa can be Cys or D-Cys
  misc_feature (7)..(7): Xaa can be Cys or D-Cys
  misc_feature (15)..(15): Xaa can be Cys or D-Cys
AVXCEFXCTPACTGXY

SEQ ID NO: 3429 - protein, 15 aa, Artificial Sequence
  Synthetically generated peptide
  misc_feature (3)..(3): Xaa can be Cys or D-Cys
AVXCEWCCNPACTGC

SEQ ID NO: 3430 - protein, 16 aa, Artificial Sequence
  Synthetically generated peptide
  misc_feature (3)..(3): Xaa can be Cys or D-Cys
AVXCEWCCNPACTGCK

SEQ ID NO: 3431 - protein, 16 aa, Artificial Sequence
  Synthetically generated peptide
  misc_feature (3)..(3): Xaa can be Cys or D-Cys
AVXCEWCCNPACTGCY

SEQ ID NO: 3432 - protein, 15 aa, Artificial Sequence
  Synthetically generated peptide
  misc_feature (3)..(3): Xaa can be Cys or D-Cys
  misc_feature (15)..(15): Xaa can be Cys or D-Cys
AVXCEWCCNPACTGX

SEQ ID NO: 3433 - protein, 16 aa, Artificial Sequence
  Synthetically generated peptide
  misc_feature (3)..(3): Xaa can be Cys or D-Cys
  misc_feature (15)..(15): Xaa can be Cys or D-Cys
AVXCEWCCNPACTGXK

SEQ ID NO: 3434 - protein, 16 aa, Artificial Sequence
  Synthetically generated peptide
  misc_feature (3)..(3): Xaa can be Cys or D-Cys
  misc_feature (15)..(15): Xaa can be Cys or D-Cys
AVXCEWCCNPACTGXY

SEQ ID NO: 3435 - protein, 15 aa, Artificial Sequence
  Synthetically generated peptide
  misc_feature (3)..(3): Xaa can be Cys or D-Cys
AVXCEWCCTPACTGC

SEQ ID NO: 3436 - protein, 16 aa, Artificial Sequence
  Synthetically generated peptide
  misc_feature (3)..(3): Xaa can be Cys or D-Cys
AVXCEWCCTPACTGCK

SEQ ID NO: 3437 - protein, 16 aa, Artificial Sequence
  Synthetically generated peptide
  misc_feature (3)..(3): Xaa can be Cys or D-Cys
AVXCEWCCTPACTGCY

SEQ ID NO: 3438 - protein, 15 aa, Artificial Sequence
  Synthetically generated peptide
  misc_feature (3)..(3): Xaa can be Cys or D-Cys
  misc_feature (15)..(15): Xaa can be Cys or D-Cys
AVXCEWCCTPACTGX

SEQ ID NO: 3439 - protein, 16 aa, Artificial Sequence
  Synthetically generated peptide
  misc_feature (3)..(3): Xaa can be Cys or D-Cys
  misc_feature (15)..(15): Xaa can be Cys or D-Cys
AVXCEWCCTPACTGXK

SEQ ID NO: 3440 - protein, 16 aa, Artificial Sequence
  Synthetically generated peptide
  misc_feature (3)..(3): Xaa can be Cys or D-Cys
  misc_feature (15)..(15): Xaa can be Cys or D-Cys
AVXCEWCCTPACTGXY

SEQ ID NO: 3441 - protein, 15 aa, Artificial Sequence
  Synthetically generated peptide
  misc_feature (3)..(3): Xaa can be Cys or D-Cys
  misc_feature (7)..(7): Xaa can be Cys or D-Cys
AVXCEWXCNPACTGC

SEQ ID NO: 3442 - protein, 16 aa, Artificial Sequence
  Synthetically generated peptide
  misc_feature (3)..(3): Xaa can be Cys or D-Cys
  misc_feature (7)..(7): Xaa can be Cys or D-Cys
AVXCEWXCNPACTGCK

SEQ ID NO: 3443 - protein, 16 aa, Artificial Sequence
  Synthetically generated peptide
  misc_feature (3)..(3): Xaa can be Cys or D-Cys
  misc_feature (7)..(7): Xaa can be Cys or D-Cys
AVXCEWXCNPACTGCY

SEQ ID NO: 3444 - protein, 15 aa, Artificial Sequence
  Synthetically generated peptide
  misc_feature (3)..(3): Xaa can be Cys or D-Cys
  misc_feature (7)..(7): Xaa can be Cys or D-Cys
  misc_feature (15)..(15): Xaa can be Cys or D-Cys
AVXCEWXCNPACTGX

SEQ ID NO: 3445 - protein, 16 aa, Artificial Sequence
  Synthetically generated peptide
  misc_feature (3)..(3): Xaa can be Cys or D-Cys
  misc_feature (7)..(7): Xaa can be Cys or D-Cys
  misc_feature (15)..(15): Xaa can be Cys or D-Cys
AVXCEWXCNPACTGXK

SEQ ID NO: 3446 - protein, 16 aa, Artificial Sequence
  Synthetically generated peptide
  misc_feature (3)..(3): Xaa can be Cys or D-Cys
  misc_feature (7)..(7): Xaa can be Cys or D-Cys
  misc_feature (15)..(15): Xaa can be Cys or D-Cys
AVXCEWXCNPACTGXY

SEQ ID NO: 3447 - protein, 15 aa, Artificial Sequence
  Synthetically generated peptide
  misc_feature (3)..(3): Xaa can be Cys or D-Cys
  misc_feature (7)..(7): Xaa can be Cys or D-Cys
AVXCEWXCTPACTGC

SEQ ID NO: 3448 - protein, 16 aa, Artificial Sequence
  Synthetically generated peptide
  misc_feature (3)..(3): Xaa can be Cys or D-Cys
  misc_feature (7)..(7): Xaa can be Cys or D-Cys
AVXCEWXCTPACTGCK

SEQ ID NO: 3449 - protein, 16 aa, Artificial Sequence
  Synthetically generated peptide
  misc_feature (3)..(3): Xaa can be Cys or D-Cys
  misc_feature (7)..(7): Xaa can be Cys or D-Cys
AVXCEWXCTPACTGCY

SEQ ID NO: 3450 - protein, 15 aa, Artificial Sequence
  Synthetically generated peptide
  misc_feature (3)..(3): Xaa can be Cys or D-Cys
  misc_feature (7)..(7): Xaa can be Cys or D-Cys
  misc_feature (15)..(15): Xaa can be Cys or D-Cys
AVXCEWXCTPACTGX

SEQ ID NO: 3451 - protein, 16 aa, Artificial Sequence
  Synthetically generated peptide
  misc_feature (3)..(3): Xaa can be Cys or D-Cys
  misc_feature (7)..(7): Xaa can be Cys or D-Cys
  misc_feature (15)..(15): Xaa can be Cys or D-Cys
AVXCEWXCTPACTGXK

SEQ ID NO: 3452 - protein, 16 aa, Artificial Sequence
  Synthetically generated peptide
  misc_feature (3)..(3): Xaa can be Cys or D-Cys
  misc_feature (7)..(7): Xaa can be Cys or D-Cys
  misc_feature (15)..(15): Xaa can be Cys or D-Cys
AVXCEWXCTPACTGXY
